United States Patent Application Publication US 2023/0026259 A1 - sequence listing, part 95

SEQ ID NO: 206658 - protein, 428 aa, Artificial Sequence
  Description of Artificial Sequence: Synthetic Chimeric Antigen Receptor
MALPVTALLLPLALLLHAARPEIVLTQSPGTLSLSPGERATLSCRASQSVSSSYLAWYQQKPGQAPRLLIYGASSRATGIPDRFSGSGSGTDFTLTISRLEPEDFAVYYCQQYGSSRFTFGPGTKVDIKGSTSGSGKPGSGEGSTKGQVQLVQSGAEVKKPGSSVKVSCKDSGGTFSSYAISWVRQAPGQGLEWMGGIIPIFGTTNYAQQFQGRVTITADESTSTAYMELSSLRSEDTAVYYCAREAVAADWLDPWGQGTLVTVSSFVPVFLPAKPTTTPAPRPPTPAPTIASQPLSLRPEACRPAAGGAVHTRGLDFACDIYIWAPLAGTCGVLLLSLVITLYCNHRNRSKRSRLLHSDYMNMTPRRPGPTRKHYQPYAPPRDFAAYRSQVRKAAITSYEKSDGVYTGLSTRNQETYETLKHEKPPQ

SEQ ID NO: 206659 - protein, 432 aa, Artificial Sequence
  Description of Artificial Sequence: Synthetic Chimeric Antigen Receptor
MLLLVTSLLLCELPHPAFLLIPDIQMTQTTSSLSASLGDRVTISCRASQDISKYLNWYQQKPDGTVKLLIYHTSRLHSGVPSRFSGSGSGTDYSLTISNLEQEDIATYFCQQGNTLPYTFGGGTKLEITGSTSGSGKPGSGEGSTKGEVKLQESGPGLVAPSQSLSVTCTVSGVSLPDYGVSWIRQPPRKGLEWLGVIWGSETTYYNSALKSRLTIIKDNSKSQVFLKMNSLQTDDTAIYYCAKHYYYGGSYAMDYWGQGTSVTVSSAAAFVPVFLPAKPTTTPAPRPPTPAPTIASQPLSLRPEACRPAAGGAVHTRGLDFACDIYIWAPLAGTCGVLLLSLVITLYCNHRNRSKRSRLLHSDYMNMTPRRPGPTRKHYQPYAPPRDFAAYRSQVRKAAITSYEKSDGVYTGLSTRNQETYETLKHEKPPQ

SEQ ID NO: 206660 - protein, 465 aa, Artificial Sequence
  Description of Artificial Sequence: Synthetic polypeptide
DIQMTQTTSSLSASLGDRVTISCRASQDISKYLNWYQQKPDGTVKLLIYHTSRLHSGVPSRFSGSGSGTDYSLTISNLEQEDIATYFCQQGNTLPYTFGGGTKLEITGGGGSGGGGSGGGGSEVKLQESGPGLVAPSQSLSVTCTVSGVSLPDYGVSWIRQPPRKGLEWLGVIWGSETTYYNSALKSRLTIIKDNSKSQVFLKMNSLQTDDTAIYYCAKHYYYGGSYAMDYWGQGTSVTVSSTTTPAPRPPTPAPTIASQPLSLRPEACRPAAGGAVHTRGLDFACDIYIWAPLAGTCGVLLLSLVITLYCKRGRKKLLYIFKQPFMRPVQTTQEEDGCSCRFPEEEEGGCELRVKFSRSADAPAYKQGQNQLYNELNLGRREEYDVLDKRRGRDPEMGGKPRRKNPQEGLYNELQKDKMAEAYSEIGMKGERRRGKGHDGLYQGLSTATKDTYDALHMQALPPR

SEQ ID NO: 206661 - protein, 465 aa, Artificial Sequence
  Description of Artificial Sequence: Synthetic Chimeric Antigen Receptor
MGTSLLCWMALCLLGADHADAQVQLQQSGPELVKPGASVKISCKASGYAFSSSWMNWVKQRPGKGLEWIGRIYPGDEDTNYSGKFKDKATLTADKSSTTAYMQLSSLTSEDSAVYFCARSLLYGDYLDYWGQGTTLTVSSGGGGSGGGGSGGGGSQIVLTQSPAIMSASPGEKVTMTCSASSSVSYMHWYQQKSGTSPKRWIYDTSKLASGVPDRFSGSGSGTSYFLTINNMEAEDAATYYCQQWNINPLTFGAGTKLELKRSDPAEPKSPDKTHTCPPCPKDPKFWVLVVVGGVLACYSLLVTVAFIIFWVRSKRSRLLHSDYMNMTPRRPGPTRKHYQPYAPPRDFAAYRSRVKFSRSADAPAYQQGQNQLYNELNLGRREEYDVLDKRRGRDPEMGGKPRRKNPQEGLYNELQKDKMAEAYSEIGMKGERRRGKGHDGLYQGLSTATKDTYDALHMQALPPR

SEQ ID NO: 206662 - protein, 467 aa, Artificial Sequence
  Description of Artificial Sequence: Synthetic polypeptide
DIQMTQTTSSLSASLGDRVTISCRASQDISKYLNWYQQKPDGTVKLLIYHTSRLHSGVPSRFSGSGSGTDYSLTISNLEQEDIATYFCQQGNTLPYTFGGGTKLEITGSTSGSGKPGSGEGSTKGEVKLQESGPGLVAPSQSLSVTCTVSGVSLPDYGVSWIRQPPRKGLEWLGVIWGSETTYYNSALKSRLTIIKDNSKSQVFLKMNSLQTDDTAIYYCAKHYYYGGSYAMDYWGQGTSVTVSSAAAIEVMYPPPYLDNEKSNGTIIHVKGKHLCPSPLFPGPSKPFWVLVVVGGVLACYSLLVTVAFIIFWVRSKRSRLLHSDYMNMTPRRPGPTRKHYQPYAPPRDFAAYRSRVKFSRSADAPAYQQGQNQLYNELNLGRREEYDVLDKRRGRDPEMGGKPRRKNPQEGLYNELQKDKMAEAYSEIGMKGERRRGKGHDGLYQGLSTATKDTYDALHMQALPPR

SEQ ID NO: 206663 - protein, 476 aa, Artificial Sequence
  Description of Artificial Sequence: Synthetic Chimeric Antigen Receptor
MALPVTALLLPLALLLHAARPEIVLTQSPGTLSLSPGERATLSCRASQSVSSSYLAWYQQKPGQAPRLLIYGASSRATGIPDRFSGSGSGTDFTLTISRLEPEDFAVYYCQQYGSSRFTFGPGTKVDIKGSTSGSGKPGSGEGSTKGQVQLVQSGAEVKKPGSSVKVSCKDSGGTFSSYAISWVRQAPGQGLEWMGGIIPIFGTTNYAQQFQGRVTITADESTSTAYMELSSLRSEDTAVYYCAREAVAADWLDPWGQGTLVTVSSFVPVFLPAKPTTTPAPRPPTPAPTIASQPLSLRPEACRPAAGGAVHTRGLDFACDIYIWAPLAGTCGVLLLSLVITLYCNHRNRSKRSRLLHSDYMNMTPRRPGPTRKHYQPYAPPRDFAAYRSQRRKYRSNKGESPVEPAEPCRYSCPREEEGSTIPIQEDYRKPEPACSPQVRKAAITSYEKSDGVYTGLSTRNQETYETLKHEKPPQ

SEQ ID NO: 206664 - protein, 476 aa, Artificial Sequence
  Description of Artificial Sequence: Synthetic Chimeric Antigen Receptor
MLLLVTSLLLCELPHPAFLLIPDIQMTQTTSSLSASLGDRVTISCRASQDISKYLNWYQQKPDGTVKLLIYHTSRLHSGVPSRFSGSGSGTDYSLTISNLEQEDIATYFCQQGNTLPYTFGGGTKLEITGSTSGSGKPGSGEGSTKGEVKLQESGPGLVAPSQSLSVTCTVSGVSLPDYGVSWIRQPPRKGLEWLGVIWGSETTYYNSALKSRLTIIKDNSKSQVFLKMNSLQTDDTAIYYCAKHYYYGGSYAMDYWGQGTSVTVSSESKYGPPCPPCPMFWVLVVVGGVLACYSLLVTVAFIIFWVKRGRKKLLYIFKQPFMRPVQTTQEEDGCSCRFPEEEEGGCELRVKFSRSADAPAYQQGQNQLYNELNLGRREEYDVLDKRRGRDPEMGGKPRRKNPQEGLYNELQKDKMAEAYSEIGMKGERRRGKGHDGLYQGLSTATKDTYDALHMQALPPRLEGGGEGRGSLLTCG

SEQ ID NO: 206665 - protein, 480 aa, Artificial Sequence
  Description of Artificial Sequence: Synthetic Chimeric Antigen Receptor
MLLLVTSLLLCELPHPAFLLIPDIQMTQTTSSLSASLGDRVTISCRASQDISKYLNWYQQKPDGTVKLLIYHTSRLHSGVPSRFSGSGSGTDYSLTISNLEQEDIATYFCQQGNTLPYTFGGGTKLEITGSTSGSGKPGSGEGSTKGEVKLQESGPGLVAPSQSLSVTCTVSGVSLPDYGVSWIRQPPRKGLEWLGVIWGSETTYYNSALKSRLTIIKDNSKSQVFLKMNSLQTDDTAIYYCAKHYYYGGSYAMDYWGQGTSVTVSSAAAFVPVFLPAKPTTTPAPRPPTPAPTIASQPLSLRPEACRPAAGGAVHTRGLDFACDIYIWAPLAGTCGVLLLSLVITLYCNHRNRSKRSRLLHSDYMNMTPRRPGPTRKHYQPYAPPRDFAAYRSQRRKYRSNKGESPVEPAEPCRYSCPREEEGSTIPIQEDYRKPEPACSPQVRKAAITSYEKSDGVYTGLSTRNQETYETLKHEKPPQ

SEQ ID NO: 206666 - protein, 484 aa, Artificial Sequence
  Description of Artificial Sequence: Synthetic Chimeric Antigen Receptor
MALPVTALLLPLALLLHAARPDIQMTQTTSSLSASLGDRVTISCRASQDISKYLNWYQQKPDGTVKLLIYHTSRLHSGVPSRFSGSGSGTDYSLTISNLEQEDIATYFCQQGNTLPYTFGGGTKLEITGGGGSGGGGSGGGGSEVKLQESGPGLVAPSQSLSVTCTVSGVSLPDYGVSWIRQPPRKGLEWLGVIWGSETTYYNSALKSRLTIIKDNSKSQVFLKMNSLQTDDTAIYYCAKHYYYGGSYAMDYWGQGTSVTVSSTTTPAPRPPTPAPTIASQPLSLRPEACRPAAGGAVHTRGLDFACDMWAPLAGTCGVLLLSLVITLYCKRGRKKLLYIFKQPFMRPVQTTQEEDGCSCRFPEEEEGGCELRVKFSRSADAPAYKQGQNQLYNELNLGRREEYDVLDKRRGRDPEMGGKPRRKNPQEGLYNELQKDKMAEAYSEIGMKGERRRGKGHDGLYQGLSTATKDTYDALHMQALPPR

SEQ ID NO: 206667 - protein, 486 aa, Artificial Sequence
  Description of Artificial Sequence: Synthetic Chimeric Antigen Receptor
MALPVTALLLPLALLLHAARPEIVMTQSPATLSLSPGERATLSCRASQDISKYLNWYQQKPGQAPRLLIYHTSRLHSGIPARFSGSGSGTDYTLTISSLQPEDFAVYFCQQGNTLPYTFGQGTKLEIKGGGGSGGGGSGGGGSQVQLQESGPGLVKPSETLSLTCTVSGVSLPDYGVSWIRQPPGKGLEWIGVIWGSETTYYQSSLKSRVTISKDNSKNQVSLKLSSVTAADTAVYYCAKHYYYGGSYAMDYWGQGTLVTVSSTTTPAPRPPTPAPTIASQPLSLRPEACRPAAGGAVHTRGLDFACDIYIWAPLAGTCGVLLLSLVITLYCKRGRKKLLYIFKQPFMRPVQTTQEEDGCSCRFPEEEEGGCELRVKFSRSADAPAYKQGQNQLYNELNLGRREEYDVLDKRRGRDPEMGGKPRRKNPQEGLYNELQKDKMAEAYSEIGMKGERRRGKGHDGLYQGLSTATKDTYDALHMQALPPR

SEQ ID NO: 206668 - protein, 486 aa, Artificial Sequence
  Description of Artificial Sequence: Synthetic Chimeric Antigen Receptor
MALPVTALLLPLALLLHAARPQVQLQESGPGLVKPSETLSLTCTVSGVSLPDYGVSWIRQPPGKGLEWIGVIWGSETTYYQSSLKSRVTISKDNSKNQVSLKLSSVTAADTAVYYCAKHYYYGGSYAMDYWGQGTLVTVSSGGGGSGGGGSGGGGSEIVMTQSPATLSLSPGERATLSCRASQDISKYLNWYQQKPGQAPRLLIYHTSRLHSGIPARFSGSGSGTDYTLTISSLQPEDFAVYFCQQGNTLPYTFGQGTKLEIKTTTPAPRPPTPAPTIASQPLSLRPEACRPAAGGAVHTRGLDFACDIYIWAPLAGTCGVLLLSLVITLYCKRGRKKLLYIFKQPFMRPVQTTQEEDGCSCRFPEEEEGGCELRVKFSRSADAPAYKQGQNQLYNELNLGRREEYDVLDKRRGRDPEMGGKPRRKNPQEGLYNELQKDKMAEAYSEIGMKGERRRGKGHDGLYQGLSTATKDTYDALHMQALPPR

SEQ ID NO: 206669 - protein, 489 aa, Artificial Sequence
  Description of Artificial Sequence: Synthetic Chimeric Antigen Receptor
MALPVTALLLPLALLLHAARPDIQMTQTTSSLSASLGDRVTISCRASQDISKYLNWYQQKPDGTVKLLIYHTSRLHSGVPSRFSGSGSGTDYSLTISNLEQEDIATYFCQQGNTLPYTFGGGTKLEITGGGGSGGGGSGGGGSEVKLQESGPGLVAPSQSLSVTCTVSGVSLPDYGVSWIRQPPRKGLEWLGVIWGSETTYYNSALKSRLTIIKDNSKSQVFLKMNSLQTDDTAIYYCAKHYYYGGSYAMDYWGQGTSVTVSSTRTTTPAPRPPTPAPTIASQPLSLRPEACRPAAGGAVHTRGLDFACDIYIWAPLAGTCGVLLLSLVITLYCAVSLSKMLKKRSPLTTGVYVKMPPTEPECEKQFQPYFIPINSARVKFSRSADAPAYKQGQNQLYNELNLGRREEYDVLDKRRGRDPEMGGKPRRKNPQEGLYNELQKDKMAEAYSEIGMKGERRRGKGHDGLYQGLSTATKDTYDALHMQALPPR

SEQ ID NO: 206670 - protein, 491 aa, Artificial Sequence
  Description of Artificial Sequence: Synthetic Chimeric Antigen Receptor
MALPVTALLLPLALLLHAARPEIVMTQSPATLSLSPGERATLSCRASQDISKYLNWYQQKPGQAPRLLIYHTSRLHSGIPARFSGSGSGTDYTLTISSLQPEDFAVYFCQQGNTLPYTFGQGTKLEIKGGGGSGGGGSGGGGSGGGGSQVQLQESGPGLVKPSETLSLTCTVSGVSLPDYGVSWIRQPPGKGLEWIGVIWGSETTYYNSSLKSRVTISKDNSKNQVSLKLSSVTAADTAVYYCAKHYYYGGSYAMDYWGQGTLVTVSSTTTPAPRPPTPAPTIASQPLSLRPEACRPAAGGAVHTRGLDFACDIYIWAPLAGTCGVLLLSLVITLYCKRGRKKLLYIFKQPFMRPVQTTQEEDGCSCRFPEEEEGGCELRVKFSRSADAPAYKQGQNQLYNELNLGRREEYDVLDKRRGRDPEMGGKPRRKNPQEGLYNELQKDKMAEAYSEIGMKGERRRGKGHDGLYQGLSTATKDTYDALHMQALPPR

SEQ ID NO: 206671 - protein, 494 aa, Artificial Sequence
  Description of Artificial Sequence: Synthetic Chimeric Antigen Receptor
METDTLLLWVLLLWVPGSTGDIQMTQTTSSLSASLGDRVTISCRASQDISKYLNWYQQKPDGTVKLLIYHTSRLHSGVPSRFSGSGSGTDYSLTISNLEQEDIATYFCQQGNTLPYTFGGGTKLEITKAGGGGSGGGGSGGGGSGGGGSEVKLQESGPGLVAPSQSLSVTCTVSGVSLPDYGVSWIRQPPRKGLEWLGVIWGSETTYYNSALKSRLTIIKDNSKSQVFLKMNSLQTDDTAIYYCAKHYYYGGSYAMDYWGQGTSVTVSSDPTTTPAPRPPTPAPTIASQPLSLRPEACRPAAGGAVHTRGLDFACDIYIWAPLAGTCGVLLLSLVITLYCKRGRKKLLYIFKQPFMRPVQTTQEEDGCSCRFPEEEEGGCELRVKFSRSADAPAYQQGQNQLYNELNLGRREEYDVLDKRRGRDPEMGGKPRRKNPQEGLYNELQKDKMAEAYSEIGMKGERRRGKGHDGLYQGLSTATKDTYDALHMQALPPR

SEQ ID NO: 206672 - protein, 495 aa, Artificial Sequence
  Description of Artificial Sequence: Synthetic Chimeric Antigen Receptor
MALPVTALLLPLALLLHAARPEVQLQQSGPELIKPGASVKMSCKASGYTFTSYVMHWVKQKPGQGLEWIGYINPYNDGTKYNEKFKGKATLTSDKSSSTAYMELSSLTSEDSAVYYCARGTYYYGSRVFDYWGQGTTLTVSSGGGGSGGGGSGGGGSDIVMTQAAPSIPVTPGESVSISCRSSKSLLNSNGNTYLYWFLQRPGQSPQLLIYRMSNLASGVPDRFSGSGSGTAFTLRISRVEAEDVGVYYCMQHLEYPFTFGAGTKLELKRADTTTPAPRPPTPAPTIASQPLSLRPEACRPAAGGAVHTRGLDFACDIYIWAPLAGTCGVLLLSLVITLYCKRGRKKLLYIFKQPFMRPVQTTQEEDGCSCRFPEEEEGGCELRVKFSRSADAPAYQQGQNQLYNELNLGRREEYDVLDKRRGRDPEMGGKPRRKNPQEGLYNELQKDKMAEAYSEIGMKGERRRGKGHDGLYQGLSTATKDTYDALHMQALPPR

SEQ ID NO: 206673 - protein, 495 aa, Artificial Sequence; identical to SEQ ID NO: 205132
  Description of Artificial Sequence: Synthetic Chimeric Antigen Receptor

SEQ ID NO: 206674 - protein, 502 aa, Artificial Sequence
  Description of Artificial Sequence: Synthetic Chimeric Antigen Receptor
MALPVTALLLPLALLLHAARPEIVLTQSPGTLSLSPGERATLSCRASQSVSSSYLAWYQQKPGQAPRLLIYGASSRATGIPDRFSGSGSGTDFTLTISRLEPEDFAVYYCQQYGSSRFTFGPGTKVDIKGSTSGSGKPGSGEGSTKGQVQLVQSGAEVKKPGSSVKVSCKDSGGTFSSYAISWVRQAPGQGLEWMGGIIPIFGTTNYAQQFQGRVTITADESTSTAYMELSSLRSEDTAVYYCAREAVAADWLDPWGQGTLVTVSSFVPVFLPAKPTTTPAPRPPTPAPTIASQPLSLRPEACRPAAGGAVHTRGLDFACDIYIWAPLAGTCGVLLLSLVITLYCNHRNRSKRSRLLHSDYMNMTPRRPGPTRKHYQPYAPPRDFAAYRSRVKFSRSADAPAYQQGQNQLYNELNLGRREEYDVLDKRRGRDPEMGGKPRRKNPQEGLYNELQKDKMAEAYSEIGMKGERRRGKGHDGLYQGLSTATKDTYDALHMQALPPR

SEQ ID NO: 206675 - protein, 506 aa, Artificial Sequence
  Description of Artificial Sequence: Synthetic Chimeric Antigen Receptor
MLLLVTSLLLCELPHPAFLLIPDIQMTQTTSSLSASLGDRVTISCRASQDISKYLNWYQQKPDGTVKLLIYHTSRLHSGVPSRFSGSGSGTDYSLTISNLEQEDIATYFCQQGNTLPYTFGGGTKLEITGSTSGSGKPGSGEGSTKGEVKLQESGPGLVAPSQSLSVTCTVSGVSLPDYGVSWIRQPPRKGLEWLGVIWGSETTYYNSALKSRLTIIKDNSKSQVFLKMNSLQTDDTAIYYCAKHYYYGGSYAMDYWGQGTSVTVSSAAAFVPVFLPAKPTTTPAPRPPTPAPTIASQPLSLRPEACRPAAGGAVHTRGLDFACDIYIWAPLAGTCGVLLLSLVITLYCNHRNRSKRSRLLHSDYMNMTPRRPGPTRKHYQPYAPPRDFAAYRSRVKFSRSADAPAYQQGQNQLYNELNLGRREEYDVLDKRRGRDPEMGGKPRRKNPQEGLYNELQKDKMAEAYSEIGMKGERRRGKGHDGLYQGLSTATKDTYDALHMQALPPR

SEQ ID NO: 206676 - protein, 508 aa, Artificial Sequence
  Description of Artificial Sequence: Synthetic Chimeric Antigen Receptor
MALPVTALLLPLALLLHAARPEIVLTQSPGTLSLSPGERATLSCRASQSVSSSYLAWYQQKPGQAPRLLIYGASSRATGIPDRFSGSGSGTDFTLTISRLEPEDFAVYYCQQYGSSRFTFGPGTKVDIKGSTSGSGKPGSGEGSTKGQVQLVQSGAEVKKPGSSVKVSCKDSGGTFSSYAISWVRQAPGQGLEWMGGIIPIFGTTNYAQQFQGRVTITADESTSTAYMELSSLRSEDTAVYYCAREAVAADWLDPWGQGTLVTVSSFVPVFLPAKPTTTPAPRPPTPAPTIASQPLSLRPEACRPAAGGAVHTRGLDFACDIYIWAPLAGTCGVLLLSLVITLYCNHRNRFSVVKRGRKKLLYIFKQPFMRPVQTTQEEDGCSCRFPEEEEGGCELRVKFSRSADAPAYQQGQNQLYNELNLGRREEYDVLDKRRGRDPEMGGKPRRKNPQEGLYNELQKDKMAEAYSEIGMKGERRRGKGHDGLYQGLSTATKDTYDALHMQALPPR

SEQ ID NO: 206677 - protein, 508 aa, Artificial Sequence
  Description of Artificial Sequence: Synthetic Chimeric Antigen Receptor
MALPVTALLLPLALLLHAARPEIVMTQSPATLSLSPGERATLSCRASQDISKYLNWYQQKPGQAPRLLIYHTSRLHSGIPARFSGSGSGTDYTLTISSLQPEDFAVYFCQQGNTLPYTFGQGTKLEIKGGGGSGGGGSGGGGSQVQLQESGPGLVKPSETLSLTCTVSGVSLPDYGVSWIRQPPGKGLEWIGVIWGSETTYYSSSLKSRVTISKDNSKNQVSLKLSSVTAADTAVYYCAKHYYYGGSYAMDYWGQGTLVTVSSTTTPAPRPPTPAPTIASQPLSLRPEACRPAAGGAVHTRGLDFACDIYIWAPLAGTCGVLLLSLVITLYCALYLLRRDQRLPPDAHKPPGGGSFRTPIQEEQADAHSTLAKIRSKRSRLLHSDYMNMTPRRPGPTRKHYQPYAPPRDFAAYRSILWHEMWHEGLIEASRLYFGERNVKGMFEVLEPLHAMMERGPQTLKETSFNQAYGRDLMEAQEWCRKYMKSGNVKDLLQAWDLYYHVFRRISK

SEQ ID NO: 206678 - protein, 508 aa, Artificial Sequence
  Description of Artificial Sequence: Synthetic Chimeric Antigen Receptor
MALPVTALLLPLALLLHAARPEIVMTQSPATLSLSPGERATLSCRASQDISKYLNWYQQKPGQAPRLLIYHTSRLHSGIPARFSGSGSGTDYTLTISSLQPEDFAVYFCQQGNTLPYTFGQGTKLEIKGGGGSGGGGSGGGGSQVQLQESGPGLVKPSETLSLTCTVSGVSLPDYGVSWIRQPPGKGLEWIGVIWGSETTYYSSSLKSRVTISKDNSKNQVSLKLSSVTAADTAVYYCAKHYYYGGSYAMDYWGQGTLVTVSSTTTPAPRPPTPAPTIASQPLSLRPEACRPAAGGAVHTRGLDFACDIYIWAPLAGTCGVLLLSLVITLYCKRGRKKLLYIFKQPFMRPVQTTQEEDGCSCRFPEEEEGGCELRSKRSRLLHSDYMNMTPRRPGPTRKHYQPYAPPRDFAAYRSILWHEMWHEGLIEASRLYFGERNVKGMFEVLEPLHAMMERGPQTLKETSFNQAYGRDLMEAQEWCRKYMKSGNVKDLLQAWDLYYHVFRRISK

SEQ ID NO: 206679 - protein, 509 aa, Artificial Sequence
  Description of Artificial Sequence: Synthetic Chimeric Antigen Receptor
MALPVTALLLPLALLLHAARPEIVLTQSPGTLSLSPGERATLSCRASQSVSSSYLAWYQQKPGQAPRLLIYGASSRATGIPDRFSGSGSGTDFTLTISRLEPEDFAVYYCQQYGSSRFTFGPGTKVDIKGSTSGSGKPGSGEGSTKGQVQLVQSGAEVKKPGSSVKVSCKDSGGTFSSYAISWVRQAPGQGLEWMGGIIPIFGTTNYAQQFQGRVTITADESTSTAYMELSSLRSEDTAVYYCAREAVAADWLDPWGQGTLVTVSSFVPVFLPAKPTTTPAPRPPTPAPTIASQPLSLRPEACRPAAGGAVHTRGLDFACDIYIWAPLAGTCGVLLLSLVITLYCNHRNQRRKYRSNKGESPVEPAEPCRYSCPREEEGSTIPIQEDYRKPEPACSPRVKFSRSADAPAYQQGQNQLYNELNLGRREEYDVLDKRRGRDPEMGGKPRRKNPQEGLYNELQKDKMAEAYSEIGMKGERRRGKGHDGLYQGLSTATKDTYDALHMQALPPR

SEQ ID NO: 206680 - protein, 513 aa, Artificial Sequence
  Description of Artificial Sequence: Synthetic Chimeric Antigen Receptor
MLLLVTSLLLCELPHPAFLLIPDIQMTQTTSSLSASLGDRVTISCRASQDISKYLNWYQQKPDGTVKLLIYHTSRLHSGVPSRFSGSGSGTDYSLTISNLEQEDIATYFCQQGNTLPYTFGGGTKLEITGSTSGSGKPGSGEGSTKGEVKLQESGPGLVAPSQSLSVTCTVSGVSLPDYGVSWIRQPPRKGLEWLGVIWGSETTYYNSALKSRLTIIKDNSKSQVFLKMNSLQTDDTAIYYCAKHYYYGGSYAMDYWGQGTSVTVSSAAAFVPVFLPAKPTTTPAPRPPTPAPTIASQPLSLRPEACRPAAGGAVHTRGLDFACDIYIWAPLAGTCGVLLLSLVITLYCNHRNQRRKYRSNKGESPVEPAEPCRYSCPREEEGSTIPIQEDYRKPEPACSPRVKFSRSADAPAYQQGQNQLYNELNLGRREEYDVLDKRRGRDPEMGGKPRRKNPQEGLYNELQKDKMAEAYSEIGMKGERRRGKGHDGLYQGLSTATKDTYDALHMQALPPR

SEQ ID NO: 206681 - protein, 514 aa, Artificial Sequence
  Description of Artificial Sequence: Synthetic Chimeric Antigen Receptor
MALPVTALLLPLALLLHAARPEIVMTQSPATLSLSPGERATLSCRASQDISKYLNWYQQKPGQAPRLLIYHTSRLHSGIPARFSGSGSGTDYTLTISSLQPEDFAVYFCQQGNTLPYTFGQGTKLEIKGGGGSGGGGSGGGGSQVQLQESGPGLVKPSETLSLTCTVSGVSLPDYGVSWIRQPPGKGLEWIGVIWGSETTYYSSSLKSRVTISKDNSKNQVSLKLSSVTAADTAVYYCAKHYYYGGSYAMDYWGQGTLVTVSSTTTPAPRPPTPAPTIASQPLSLRPEACRPAAGGAVHTRGLDFACDIYIWAPLAGTCGVLLLSLVITLYCQRRKYRSNKGESPVEPAEPCHYSCPREEEGSTIPIQEDYRKPEPACSPRSKRSRLLHSDYMNMTPRRPGPTRKHYQPYAPPRDFAAYRSILWHEMWHEGLIEASRLYFGERNVKGMFEVLEPLHAMMERGPQTLKETSFNQAYGRDLMEAQEWCRKYMKSGNVKDLLQAWDLYYHVFRRISK

SEQ ID NO: 206682 - protein, 522 aa, Artificial Sequence
  Description of Artificial Sequence: Synthetic Chimeric Antigen Receptor
MALPVTALLLPLALLLHAARPEIVMTQSPATLSLSPGERATLSCRASQDISKYLNWYQQKPGQAPRLLIYHTSRLHSGIPARFSGSGSGTDYTLTISSLQPEDFAVYFCQQGNTLPYTFGQGTKLEIKGGGGSGGGGSGGGGSQVQLQESGPGLVKPSETLSLTCTVSGVSLPDYGVSWIRQPPGKGLEWIGVIWGSETTYYSSSLKSRVTISKDNSKNQVSLKLSSVTAADTAVYYCAKHYYYGGSYAMDYWGQGTLVTVSSTTTPAPRPPTPAPTIASQPLSLRPEACRPAAGGAVHTRGLDFACDIYIWAPLAGTCGVLLLSLVITLYCALYLLRRDQRLPPDAHKPPGGGSFRTPIQEEQADAHSTLAKIRSKRSRLLHSDYMNMTPRRPGPTRKHYQPYAPPRDFAAYRSGVQVETISPGDGRTFPKRGQTCVVHYTGMLEDGKKFDSSRDRNKPFKFMLGKQEVIRGWEEGVAQMSVGQRAKLTISPDYAYGATGHPGIIPPHATLVFDVELLKLE

SEQ ID NO: 206683 - protein, 522 aa, Artificial Sequence
  Description of Artificial Sequence: Synthetic Chimeric Antigen Receptor
MALPVTALLLPLALLLHAARPEIVMTQSPATLSLSPGERATLSCRASQDISKYLNWYQQKPGQAPRLLIYHTSRLHSGIPARFSGSGSGTDYTLTISSLQPEDFAVYFCQQGNTLPYTFGQGTKLEIKGGGGSGGGGSGGGGSQVQLQESGPGLVKPSETLSLTCTVSGVSLPDYGVSWIRQPPGKGLEWIGVIWGSETTYYSSSLKSRVTISKDNSKNQVSLKLSSVTAADTAVYYCAKHYYYGGSYAMDYWGQGTLVTVSSTTTPAPRPPTPAPTIASQPLSLRPEACRPAAGGAVHTRGLDFACDIYIWAPLAGTCGVLLLSLVITLYCKRGRKKLLYIFKQPFMRPVQTTQEEDGCSCRFPEEEEGGCELRSKRSRLLHSDYMNMTPRRPGPTRKHYQPYAPPRDFAAYRSGVQVETISPGDGRTFPKRGQTCVVHYTGMLEDGKKFDSSRDRNKPFKFMLGKQEVIRGWEEGVAQMSVGQRAKLTISPDYAYGATGHPGIIPPHATLVFDVELLKLE

SEQ ID NO: 206684 - protein, 527 aa, Artificial Sequence
  Description of Artificial Sequence: Synthetic Chimeric Antigen Receptor
DIQMTQTTSSLSASLGDRVTISCRASQDISKYLNWYQQKPDGTVKLLIYHTSRLHSGVPSRFSGSGSGTDYSLTISNLEQEDIATYFCQQGNTLPYTFGGGTKLEITGSTSGSGKPGSGEGSTKGEVKLQESGPGLVAPSQSLSVTCTVSGVSLPDYGVSWIRQPPRKGLEWLGVRWGSETTYYNSALKSRLTIIKDNSKSQVFLKMNSLQTDDTAIYYCAKHYYYGGSYAMDYWGQGTSVTVSSAAIEVMYPPPYLDNEKSNGTIIHVKGKHLCPSPLFPGPSKPFWVLVVVGGVLACYSLLVTVAFIIFWVRSKRSRLLHSDYMNMTPRRPGPTRKHYQPYAPPRDFAAYRSASGGGGSGGGGSKSRQTPPLASVEMEAMEALPVTWGTSSRDEDLENCSHHLGGGGSGGGGSRVKFSRSADAPAYQQGQNQLYNELNLGRREEYDVLDKRRGRDPEMGGKPRRKNPQEGLYNELQKDKMAEAYSEIGMKGERRRGKGHDGLYQGLSTATKDTYDALHMQALPPR

SEQ ID NO: 206685 - protein, 528 aa, Artificial Sequence
  Description of Artificial Sequence: Synthetic Chimeric Antigen Receptor
MALPVTALLLPLALLLHAARPEIVMTQSPATLSLSPGERATLSCRASQDISKYLNWYQQKPGQAPRLLIYHTSRLHSGIPARFSGSGSGTDYTLTISSLQPEDFAVYFCQQGNTLPYTFGQGTKLEIKGGGGSGGGGSGGGGSQVQLQESGPGLVKPSETLSLTCTVSGVSLPDYGVSWIRQPPGKGLEWIGVIWGSETTYYSSSLKSRVTISKDNSKNQVSLKLSSVTAADTAVYYCAKHYYYGGSYAMDYWGQGTLVTVSSTTTPAPRPPTPAPTIASQPLSLRPEACRPAAGGAVHTRGLDFACDIYIWAPLAGTCGVLLLSLVITLYCQRRKYRSNKGESPVEPAEPCHYSCPREEEGSTIPIQEDYRKPEPACSPRSKRSRLLHSDYMNMTPRRPGPTRKHYQPYAPPRDFAAYRSGVQVETISPGDGRTFPKRGQTCVVHYTGMLEDGKKFDSSRDRNKPFKFMLGKQEVIRGWEEGVAQMSVGQRAKLTISPDYAYGATGHPGIIPPHATLVFDVELLKLE

SEQ ID NO: 206686 - protein, 530 aa, Artificial Sequence
  Description of Artificial Sequence: Synthetic Chimeric Antigen Receptor
MALPVTALLLPLALLLHAARPDIMMTQSPSSLAVSAGEKVTMTCKSSQSVLYSSNQKNYLAWYQQKPGQSPKLLIYWASTRESGVPDRFTGSGSGTDFTLTISSVQPEDLAVYYCHQYLSSHTFGGGTKLEIKRGGGGSGGGGSGGGGSQLQQPGAELVRPGSSVKLSCKASGYTFTRYWIHWVKQRPIQGLEWIGNIDPSDSETHYNQKFKDKATLTVDKSSGTAYMQLSSLTSEDSAVYYCATEDLYYAMEYWGQGTSVTVSSTTTPAPRPPTPAPTIASQPLSLRPEACRPAAGGAVHTRGLDFACDIYIWAPLAGTCGVLLLSLVITLYCRSKRSRLLHSDYMNMTPRRPGPTRKHYQPYAPPRDFAAYRSKRGRKKLLYIFKQPFMRPVQTTQEEDGCSCRFPEEEEGGCELRVKFSRSADAPAYQQGQNQLYNELNLGRREEYDVLDKRRGRDPEMGGKPQRRKNPQEGLYNELQKDKMAEAYSEIGMKGERRRGKGHDGLYQGLSTATKDTYDALHMQALPPR

SEQ ID NO: 206687 - protein, 550 aa, Artificial Sequence
  Description of Artificial Sequence: Synthetic Chimeric Antigen Receptor
MALPVTALLLPLALLLHAARPEIVLTQSPGTLSLSPGERATLSCRASQSVSSSYLAWYQQKPGQAPRLLIYGASSRATGIPDRFSGSGSGTDFTLTISRLEPEDFAVYYCQQYGSSRFTFGPGTKVDIKGSTSGSGKPGSGEGSTKGQVQLVQSGAEVKKPGSSVKVSCKDSGGTFSSYAISWVRQAPGQGLEWMGGIIPIFGTTNYAQQFQGRVTITADESTSTAYMELSSLRSEDTAVYYCAREAVAADWLDPWGQGTLVTVSSFVPVFLPAKPTTTPAPRPPTPAPTIASQPLSLRPEACRPAAGGAVHTRGLDFACDIYIWAPLAGTCGVLLLSLVITLYCNHRNRSKRSRLLHSDYMNMTPRRPGPTRKHYQPYAPPRDFAAYRSQRRKYRSNKGESPVEPAEPCRYSCPREEEGSTIPIQEDYRKPEPACSPRVKFSRSADAPAYQQGQNQLYNELNLGRREEYDVLDKRRGRDPEMGGKPRRKNPQEGLYNELQKDKMAEAYSEIGMKGERRRGKGHDGLYQGLSTATKDTYDALHMQALPPR

SEQ ID NO: 206688 - protein, 554 aa, Artificial Sequence
  Description of Artificial Sequence: Synthetic Chimeric Antigen Receptor
MLLLVTSLLLCELPHPAFLLIPDIQMTQTTSSLSASLGDRVTISCRASQDISKYLNWYQQKPDGTVKLLIYHTSRLHSGVPSRFSGSGSGTDYSLTISNLEQEDIATYFCQQGNTLPYTFGGGTKLEITGSTSGSGKPGSGEGSTKGEVKLQESGPGLVAPSQSLSVTCTVSGVSLPDYGVSWIRQPPRKGLEWLGVIWGSETTYYNSALKSRLTIIKDNSKSQVFLKMNSLQTDDTAIYYCAKHYYYGGSYAMDYWGQGTSVTVSSAAAFVPVFLPAKPTTTPAPRPPTPAPTIASQPLSLRPEACRPAAGGAVHTRGLDFACDIYIWAPLAGTCGVLLLSLVITLYCNHRNRSKRSRLLHSDYMNMTPRRPGPTRKHYQPYAPPRDFAAYRSQRRKYRSNKGESPVEPAEPCRYSCPREEEGSTIPIQEDYRKPEPACSPRVKFSRSADAPAYQQGQNQLYNELNLGRREEYDVLDKRRGRDPEMGGKPRRKNPQEGLYNELQKDKMAEAYSEIGMKGERRRGKGHDGLYQGLSTATKDTYDALHMQALPPR

SEQ ID NO: 206689 - protein, 556 aa, Artificial Sequence
  Description of Artificial Sequence: Synthetic Chimeric Antigen Receptor
MALPVTALLLPLALLLHAARPEIVLTQSPGTLSLSPGERATLSCRASQSVSSSYLAWYQQKPGQAPRLLIYGASSRATGIPDRFSGSGSGTDFTLTISRLEPEDFAVYYCQQYGSSRFTFGPGTKVDIKGSTSGSGKPGSGEGSTKGQVQLVQSGAEVKKPGSSVKVSCKDSGGTFSSYAISWVRQAPGQGLEWMGGIIPIFGTTNYAQQFQGRVTITADESTSTAYMELSSLRSEDTAVYYCAREAVAADWLDPWGQGTLVTVSSFVPVFLPAKPTTTPAPRPPTPAPTIASQPLSLRPEACRPAAGGAVHTRGLDFACDIYIWAPLAGTCGVLLLSLVITLYCNHRNQRRKYRSNKGESPVEPAEPCRYSCPREEEGSTIPIQEDYRKPEPACSPRFSVVKRGRKKLLYIFKQPFMRPVQTTQEEDGCSCRFPEEEEGGCELRVKFSRSADAPAYQQGQNQLYNELNLGRREEYDVLDKRRGRDPEMGGKPRRKNPQEGLYNELQKDKMAEAYSEIGMKGERRRGKGHDGLYQGLSTATKDTYDALHMQALPPR

SEQ ID NO: 206690 - protein, 560 aa, Artificial Sequence
  Description of Artificial Sequence: Synthetic Chimeric Antigen Receptor
MLLLVTSLLLCELPHPAFLLIPDIQMTQTTSSLSASLGDRVTISCRASQDISKYLNWYQQKPDGTVKLLIYHTSRLHSGVPSRFSGSGSGTDYSLTISNLEQEDIATYFCQQGNTLPYTFGGGTKLEITGSTSGSGKPGSGEGSTKGEVKLQESGPGLVAPSQSLSVTCTVSGVSLPDYGVSWIRQPPRKGLEWLGVIWGSETTYYNSALKSRLTIIKDNSKSQVFLKMNSLQTDDTAIYYCAKHYYYGGSYAMDYWGQGTSVTVSSAAAFVPVFLPAKPTTTPAPRPPTPAPTIASQPLSLRPEACRPAAGGAVHTRGLDFACDIYIWAPLAGTCGVLLLSLVITLYCNHRNQRRKYRSNKGESPVEPAEPCRYSCPREEEGSTIPIQEDYRKPEPACSPRFSVVKRGRKKLLYIFKQPFMRPVQTTQEEDGCSCRFPEEEEGGCELRVKFSRSADAPAYQQGQNQLYNELNLGRREEYDVLDKRRGRDPEMGGKPRRKNPQEGLYNELQKDKMAEAYSEIGMKGERRRGKGHDGLYQGLSTATKDTYDALHMQALPPR

SEQ ID NO: 206691 - protein, 580 aa, Artificial Sequence
  Description of Artificial Sequence: Synthetic Chimeric Antigen Receptor
MLLLVTSLLLCELPHPAFLLIPDIQMTQTTSSLSASLGDRVTISCRASQDISKYLNWYQQKPDGTVKLLIYHTSRLHSGVPSRFSGSGSGTDYSLTISNLEQEDIATYFCQQGNTLPYTFGGGTKLEITGSTSGSGKPGSGEGSTKGEVKLQESGPGLVAPSQSLSVTCTVSGVSLPDYGVSWIRQPPRKGLEWLGVIWGSETTYYNSALKSRLTIIKDNSKSQVFLKMNSLQTDDTAIYYCAKHYYYGGSYAMDYWGQGTSVTVSSESKYGPPCPPCPGGGSSGGGSGGQPREPQVYTLPPSQEEMTKNQVSLTCLVKGFYPSDIAVEWESNGQPENNYKTTPPVLDSDGSFFLYSRLTVDKSRWQEGNVFSCSVMHEALHNHYTQKSLSLSLGKMFWVLVVVGGVLACYSLLVTVAFIIFWVRSKRSRGGHSDYMNMTPRRPGPTRKHYQPYAPPRDFAAYRSGGGRVKFSRSADAPAYQQGQNQLYNELNLGRREEYDVLDKRRGRDPEMGGKPRRKNPQEGLYNELQKDKMAEAYSEIGMKGERRRGKGHDGLYQGLSTATKDTYDALHMQALPPR

SEQ ID NO: 206692 - protein, 680 aa, Artificial Sequence
  Description of Artificial Sequence: Synthetic Chimeric Antigen Receptor
MLLLVTSLLLCELPHPAFLLIPDIQMTQTTSSLSASLGDRVTISCRASQDISKYLNWYQQKPDGTVKLLIYHTSRLHSGVPSRFSGSGSGTDYSLTISNLEQEDIATYFCQQGNTLPYTFGGGTKLEITGSTSGSGKPGSGEGSTKGEVKLQESGPGLVAPSQSLSVTCTVSGVSLPDYGVSWIRQPPRKGLEWLGVIWGSETTYYNSALKSRLTIIKDNSKSQVFLKMNSLQTDDTAIYYCAKHYYYGGSYAMDYWGQGTSVTVSSESKYGPPCPPCPAPEFEGGPSVFLFPPKPKDTLMISRTPEVTCVVVDVSQEDPEVQFNWYVDGVEVHNAKTKPREEQFNSTYRVVSVLTVLHQDWLNGKEYKCKVSNKGLPSSIEKTISKAKGQPREPQVYTLPPSQEEMTKNQVSLTCLVKGFYPSDIAVEWESNGQPENNYKTTPPVLDSDGSFFLYSRLTVDKSRWQEGNVFSCSVMHEALHNHYTQKSLSLSLGKMFWVLVVVGGVLACYSLLVTVAFIIFWVRSKRSRGGHSDYMNMTPRRPGPTRKHYQPYAPPRDFAAYRSGGGRVKFSRSADAPAYQQGQNQLYNELNLGRREEYDVLDKRRGRDPEMGGKPRRKNPQEGLYNELQKDKMAEAYSEIGMKGERRRGKGHDGLYQGLSTATKDTYDALHMQALPPR

SEQ ID NO: 206693 - protein, 680 aa, Artificial Sequence
  Description of Artificial Sequence: Synthetic Chimeric Antigen Receptor
MLLLVTSLLLCELPHPAFLLIPDIQMTQTTSSLSASLGDRVTISCRASQDISKYLNWYQQKPDGTVKLLIYHTSRLHSGVPSRFSGSGSGTDYSLTISNLEQEDIATYFCQQGNTLPYTFGGGTKLEITGSTSGSGKPGSGEGSTKGEVKLQESGPGLVAPSQSLSVTCTVSGVSLPDYGVSWIRQPPRKGLEWLGVIWGSETTYYNSALKSRLTIIKDNSKSQVFLKMNSLQTDDTAIYYCAKHYYYGGSYAMDYWGQGTSVTVSSESKYGPPCPPCPAPEFLGGPSVFLFPPKPKDTLMISRTPEVTCVVVDVSQEDPEVQFNWYVDGVEVHNAKTKPREEQFQSTYRVVSVLTVLHQDWLNGKEYKCKVSNKGLPSSIEKTISKAKGQPREPQVYTLPPSQEEMTKNQVSLTCLVKGFYPSDIAVEWESNGQPENNYKTTPPVLDSDGSFFLYSRLTVDKSRWQEGNVFSCSVMHEALHNHYTQKSLSLSLGKMFWVLVVVGGVLACYSLLVTVAFIIFWVRSKRSRGGHSDYMNMTPRRPGPTRKHYQPYAPPRDFAAYRSGGGRVKFSRSADAPAYQQGQNQLYNELNLGRREEYDVLDKRRGRDPEMGGKPRRKNPQEGLYNELQKDKMAEAYSEIGMKGERRRGKGHDGLYQGLSTATKDTYDALHMQALPPR

SEQ ID NO: 206694 - protein, 680 aa, Artificial Sequence
  Description of Artificial Sequence: Synthetic Chimeric Antigen Receptor
MLLLVTSLLLCELPHPAFLLIPDIQMTQTTSSLSASLGDRVTISCRASQDISKYLNWYQQKPDGTVKLLIYHTSRLHSGVPSRFSGSGSGTDYSLTISNLEQEDIATYFCQQGNTLPYTFGGGTKLEITGSTSGSGKPGSGEGSTKGEVKLQESGPGLVAPSQSLSVTCTVSGVSLPDYGVSWIRQPPRKGLEWLGVIWGSETTYYNSALKSRLTIIKDNSKSQVFLKMNSLQTDDTAIYYCAKHYYYGGSYAMDYWGQGTSVTVSSESKYGPPCPPCPAPEFEGGPSVFLFPPKPKDTLMISRTPEVTCVVVDVSQEDPEVQFNWYVDGVEVHNAKTKPREEQFQSTYRVVSVLTVLHQDWLNGKEYKCKVSNKGLPSSIEKTISKAKGQPREPQVYTLPPSQEEMTKNQVSLTCLVKGFYPSDIAVEWESNGQPENNYKTTPPVLDSDGSFFLYSRLTVDKSRWQEGNVFSCSVMHEALHNHYTQKSLSLSLGKMFWVLVVVGGVLACYSLLVTVAFIIFWVRSKRSRGGHSDYMNMTPRRPGPTRKHYQPYAPPRDFAAYRSGGGRVKFSRSADAPAYQQGQNQLYNELNLGRREEYDVLDKRRGRDPEMGGKPRRKNPQEGLYNELQKDKMAEAYSEIGMKGERRRGKGHDGLYQGLSTATKDTYDALHMQALPPR

SEQ ID NO: 206695 - protein, 681 aa, Artificial Sequence
  Description of Artificial Sequence: Synthetic Chimeric Antigen Receptor
MGTSLLCWMALCLLGADHADAQVQLQQSGPELVKPGASVKISCKASGYAFSSSWMNWVKQRPGKGLEWIGRIYPGDEDTNYSGKFKDKATLTADKSSTTAYMQLSSLTSEDSAVYFCARSLLYGDYLDYWGQGTTLTVSSGGGGSGGGGSGGGGSQIVLTQSPAIMSASPGEKVTMTCSASSSVSYMHWYQQKSGTSPKRWIYDTSKLASGVPDRFSGSGSGTSYFLTINNMEAEDAATYYCQQWNINPLTFGAGTKLELKRSDPAEPKSPDKTHTCPPCPAPPVAGPSVFLFPPKPKDTLMIARTPEVTCVVVDVSHEDPEVKFNWYVDGVEVHNAKTKPREEQYNSTYRVVSVLTVLHQDWLNGKEYKCKVSNKALPAPIEKTISKAKGQPREPQVYTLPPSRDELTKNQVSLTCLVKGFYPSDIAVEWESNGQPENNYKTTPPVLDSDGSFFLYSKLTVDKSRWQQGNVFSCSVMHEALHNHYTQKSLSLSPGKKDPKFWVLVVVGGVLACYSLLVTVAFIIFWVRSKRSRLLHSDYMNMTPRRPGPTRKHYQPYAPPRDFAAYRSRVKFSRSADAPAYQQGQNQLYNELNLGRREEYDVLDKRRGRDPEMGGKPRRKNPQEGLYNELQKDKMAEAYSEIGMKGERRRGKGHDGLYQGLSTATKDTYDALHMQALPPR

SEQ ID NO: 206696 - protein, 711 aa, Artificial Sequence
  Description of Artificial Sequence: Synthetic Chimeric Antigen Receptor
MLLLVTSLLLLCELPHPAFLLIPDIQMTQQTTSSLSASLGDRVTISCRASSQDISKYLNWYQQKPDGTVKLLLIYHTSRLHSGVPSRFSGSGGSGTDYSLTISNLEQEDIATYYFCQQGNTLPYTFGGGTKLEIITGSTSGSGKPGSGEGSTKGEEVKLQESGPGLVAPSQSLSVTTCTVSGVSLPDYGVSWIRQPPPRKGLEWLGVIWGSETTYYNSSALKSRLTIIKDNSKSQVFLKKMNSLQTDDTAIYYCAKHYYYYGGSYAMDYWGQGTSVTVSSEESKYGPPCPPCPAPEFLGGPSSVFLFPPKPKDTLMISRTPEVVTCVVVDVSQEDPEVQFNWYVVDGVEVHNAKTKPREEQFNSTTYRVVSVLTVLHQDWLNGKEYYKCKVSNKGLPSSIEKTISKAAKGQPREPQVYTLPPSQEEMTTKNQVSLTCLVKGFYPSDIAVVEWESNGQPENNYKTTPPVLDDSDGSFFLYSRLTVDKSRWQEEGNVFSCSVMHEALHNHYTQKKSLSLSLGKMFWVLVVVGGVLLACYSLLVTVAFIIFWVRSKRRSRGGHSDYMNMTPRRPGPTRRKHYQPYAPPRDFAAYRSRVKKFSRSADAPAYQQGQNQLYNEELNLGRREEYDVLDKRRGRDPPEMGGKPRRKNPQEGLYNELQQKDKMAEAYSEIGMKGERRRGGKGHDGLYQGLSTATKDTYDAALHMQALPPR

SEQ ID NO: 206697 - protein, 737 aa, Artificial Sequence
  Description of Artificial Sequence: Synthetic Chimeric Antigen Receptor
EIVMTQSPATLSLSPGERATLSCRASQDISKYLNWYQQKPGQAPRLLIYHTSRLHSGIPARFSGSGSGTDYTLTISSLQPEDFAVYFCQQGNTLPYTFGQGTKLEIKGGGGSGGGGSGGGGSQVQLQESGPGLVKPSETLSLTCTVSGVSLPDYGVSWIRQPPGKGLEWIGVIWGSETTYYQSSLKSRVTISKDNSKNQVSLKLSSVTAADTAVYYCAKHYYYGGSYAMDYWGQGTLVTVSSGGGGSGGGGSGGGGSGGGGSEVQLQQSGPGLVKPSQTLSLTCAISGDSVSSNSAAWNWIRQSPSRGLEWLGRTYYRSKWYNDYAVSVKSRITINPDTSKNQFSLQLNSVTPEDTAVYYCARDLGWIAVAGTFDYWGQGTLVTVSSGGGGSGGGGSGGGGSQSALTQPASVSGSPGQSITISCTGTSSDVGGYNYVSWYQQHPGKAPKLMIYDVSKRPSGVSNRFSGSKSGNTASLTISGLQAEDEADYYCSSYTSSSLNHVFGTGTKVTVLTTTTPAPRPPTPAPTIASQPLSLRPEACRPAAGGAVHTRGLDFACDIYIWAPLAGTCGVLLLSLVITLYCKRGRKKLLYIFKQPFMRPVQTTQEEDGCSCRFPEEEEGGCELRVKFSRSADAPAYKQGQNQLYNELNLGRREEYDVLDKRRGRDPEMGGKPRRKNPQEGLYNELQKDKMAEAYSEIGMKGERRRGKGHDGLYQGLSTATKDTYDALHMQALPPR

SEQ ID NO: 206698 - protein, 819 aa, Artificial Sequence
  Description of Artificial Sequence: Synthetic polypeptide
DIQMTQTTSSLSASLGDRVTISCRASQDISKYLNWYQQKPDGTVKLLIYHTSRLHSGVPSRFSGSGSGTDYSLTISNLEQEDIATYFCQQGNTLPYTFGGGTKLEITGSTSGSGKPGSGEGSTKGEVKLQESGPGLVAPSQSLSVTCTVSGVSLPDYGVSWIRQPPRKGLEWLGVIWGSETTYYNSALKSRLTIIKDNSKSQVFLKMNSLQTDDTAIYYCAKHYYYGGSYAMDYWGQGTSVTVSSESKYGPPCPPCPMFWVLVVVGGVLACYSLLVTVAFIIFWVKRGRKKLLYIFKQPFMRPVQTTQEEDGCSCRFEEEEGGCELRVKFSRSADAPAYQQGQNQLYNELNLGRREEYDVLDKRRGRDPEMGGKPRRKNPQEGLYNELQKDKMAEAYSEIGMKGERRRGKGHDGLYQGLSTATKDTYDALHMQALPPRLEGGGEGRGSLLTCGDVEENPGPRMLLLVTSLLLCELPHPAFLLIPRKVCNGIGIGEFKDSLSINATNIKHFKNCTSISGDLHILPVAFRGDSFTHTPPLDPQELDILKTVKEITGFLLIQAWPENRTDLHAFENLEIIRGRTKQHGQFSLAVVSLNITSLGLRSLKEISDGDVIISGNKNLCYANTINWKKLFGTSGQKTKIISNRGENSCKATGQVCHALCSPEGCWGPEPRDCVSCRNVSRGRECVDKCNLLEGEPREFVENSECIQCHPECLPQAMNITCTGRGPDNCIQCAHYIDGPHCVKTCPAGVMGENNTLVWKYADAGHVCHLCHPNCTYGCTGPGLEGCPTNGPKIPSIATGMVGALLLLLVVALGIGLFM

SEQ ID NO: 206699 - protein, 838 aa, Artificial Sequence
  Description of Artificial Sequence: Synthetic Chimeric Antigen Receptor
MLLLVTSLLLCELPHPAFLLIPQSVKESEGDLVTPAGNLTLTCTASGSDINDYPISWVRQAPGKGLEWIGFINSGGSTWYASWVKGRFTISRTSTTVDLKMTSLTTDDTATYFCARGYSTYYGDFNIWGPGTLVTISSGGGGSGGGGSGGGGSELVMTQTPSSTSGAVGGTVTINCQASQSIDSNLAWFQQKPGQPPTLLIYRASNLASGVPSRFSGSRSGTEYTLTISGVQREDAATYYCLGGVGNVSYRTSFGGGTEVVVKESKYGPPCPPCPMFWVLVVVGGVLACYSLLVTVAFIIFWVKRGRKKLLYIFKQPFMRPVQTTQEEDGCSCRFPEEEEGGCELRVKFSRSADAPAYQQGQNQLYNELNLGRREEYDVLDKRRGRDPEMGGKPRRKNPQEGLYNELQKDKMAEAYSEIGMKGERRRGKGHDGLYQGLSTATKDTYDALHMQALPPRLEGGGEGRGSLLTCGDVEENPGPRMLLLVTSLLLCELPHPAFLLIPRKVCNGIGIGEFKDSLSINATNIKHFKNCTSISGDLHILPVAFRGDSFTHTPPLDPQELDILKTVKEITGFLLIQAWPENRTDLHAFENLEIIRGRTKQHGQFSLAVVSLNITSLGLRSLKEISDGDVIISGNKNLCYANTINWKKLFGTSGQKTKIISNRGENSCKATGQVCHALCSPEGCWGPEPRDCVSCRNVSRGRECVDKCNLLEGEPREFVENSECIQCHPECLPQAMNITCTGRGPDNCIQCAHYIDGPHCVKTCPAGVMGENNTLVWKYADAGHVCHLCHPNCTYGCTGPGLEGCPTNGPKIPSIATGMVGALLLLLVVALGIGLFM

SEQ ID NO: 206700 - protein, 845 aa, Artificial Sequence
  Description of Artificial Sequence: Synthetic Chimeric Antigen Receptor
MLLLVTSLLLCELPHPAFLLIPQEQLVESGGRLVTPGGSLTLSCKASGFDFSAYYMSWVRQAPGKGLEWIATIYPSSGKTYYATWVNGRFTISSDNAQNTVDLQMNSLTAADRATYFCARDSYADDGALFNIWGPGTLVTISSGGGGSGGGGSGGGGSELVLTQSPSVSAALGSPAKITCTLSSAHKTDTIDWYQQLQGEAPRYLMQVQSDGSYTKRPGVPDRFSGSSSGADRYLIIPSVQADDEADYYCGADYIGGYVFGGGTQLTVTGESKYGPPCPPCPMFWVLVVVGGVLACYSLLVTVAFIIFWVKRGRKKLLYIFKQPFMRPVQTTQEEDGCSCRFPEEEEGGCELRVKFSRSADAPAYQQGQNQLYNELNLGRREEYDVLDKRRGRDPEMGGKPRRKNPQEGLYNELQKDKMAEAYSEIGMKGERRRGKGHDGLYQGLSTATKDTYDALHMQALPPRLEGGGEGRGSLLTCGDVEENPGPRMLLLVTSLLLCELPHPAFLLIPRKVCNGIGIGEFKDSLSINATNIKHFKNCTSISGDLHILPVAFRGDSFTHTPPLDPQELDILKTVKEITGFLLIQAWPENRTDLHAFENLEIIRGRTKQHGQFSLAVVSLNITSLGLRSLKEISDGDVIISGNKNLCYANTINWKKLFGTSGQKTKIISNRGENSCKATGQVCHALCSPEGCWGPEPRDCVSCRNVSRGRECVDKCNLLEGEPREFVENSECIQCHPECLPQAMNITCTGRGPDNCIQCAHYIDGPHCVKTCPAGVMGENNTLVWKYADAGHVCHLCHPNCTYGCTGPGLEGCPTNGPKIPSIATGMVGALLLLLVVALGIGLFM

SEQ ID NO: 206701 - protein, 945 aa, Artificial Sequence
  Description of Artificial Sequence: Synthetic Chimeric Antigen Receptor
MLLLVTSLLLCELPHPAFLLIPQSVKESEGDLVTPAGNLTLTCTASGSDINDYPISWVRQAPGKGLEWIGFINSGGSTWYASWVKGRFTISRTSTTVDLKMTSLTTDDTATYFCARGYSTYYGDFNIWGPGTLVTISSGGGGSGGGGSGGGGSELVMTQTPSSTSGAVGGTVTINCQASQSIDSNLAWFQQKPGQPPTLLIYRASNLASGVPSRFSGSRSGTEYTLTISGVQREDAATYYCLGGVGNVSYRTSFGGGTEVVVKESKYGPPCPPCPGQPREPQVYTLPPSQEEMTKNQVSLTCLVKGFYPSDIAVEWESNGQPENNYKTTPPVLDSDGSFFLYSRLTVDKSRWQEGNVFSCSVMHEALHNHYTQKSLSLSLGKMFWVLVVVGGVLACYSLLVTVAFIIFWVKRGRKKLLYIFKQPFMRPVQTTQEEDGCSCRFPEEEEGGCELRVKFSRSADAPAYQQGQNQLYNELNLGRREEYDVLDKRRGRDPEMGGKPRRKNPQEGLYNELQKDKMAEAYSEIGMKGERRRGKGHDGLYQGLSTATKDTYDALHMQALPPRLEGGGEGRGSLLTCGDVEENPGPRMLLLVTSLLLCELPHPAFLLIPRKVCNGIGIGEFKDSLSINATNIKHFKNCTSISGDLHILPVAFRGDSFTHTPPLDPQELDILKTVKEITGFLLIQAWPENRTDLHAFENLEIIRGRTKQHGQFSLAVVSLNITSLGLRSLKEISDGDVIISGNKNLCYANTINWKKLFGTSGQKTKIISNRGENSCKATGQVCHALCSPEGCWGPEPRDCVSCRNVSRGRECVDKCNLLEGEPREFVENSECIQCHPECLPQAMNITCTGRGPDNCIQCAHYIDGPHCVKTCPAGVMGENNTLVWKYADAGHVCHLCHPNCTYGCTGPGLEGCPTNGPKIPSIATGMVGALLLLLVVALGIGLFM

SEQ ID NO: 206702 - protein, 952 aa, Artificial Sequence
  Description of Artificial Sequence: Synthetic Chimeric Antigen Receptor
MLLLVTSLLLCELPHPAFLLIPQEQLVESGGRLVTPGGSLTLSCKASGFDFSAYYMSWVRQAPGKGLEWIATIYPSSGKTYYATWVNGRFTISSDNAQNTVDLQMNSLTAADRATYFCARDSYADDGALFNIWGPGTLVTISSGGGGSGGGGSGGGGSELVLTQSPSVSAALGSPAKITCTLSSAHKTDTIDWYQQLQGEAPRYLMQVQSDGSYTKRPGVPDRFSGSSSGADRYLIIPSVQADDEADYYCGADYIGGYVFGGGTQLTVTGESKYGPPCPPCPGQPREPQVYTLPPSQEEMTKNQVSLTCLVKGFYPSDIAVEWESNGQPENNYKTTPPVLDSDGSFFLYSRLTVDKSRWQEGNVFSCSVMHEALHNHYTQKSLSLSLGKMFWVLVVVGGVLACYSLLVTVAFIIFWVKRGRKKLLYIFKQPFMRPVQTTQEEDGCSCRFPEEEEGGCELRVKFSRSADAPAYQQGQNQLYNELNLGRREEYDVLDKRRGRDPEMGGKPRRKNPQEGLYNELQKDKMAEAYSEIGMKGERRRGKGHDGLYQGLSTATKDTYDALHMQALPPRLEGGGEGRGSLLTCGDVEENPGPRMLLLVTSLLLCELPHPAFLLIPRKVCNGIGIGEFKDSLSINATNIKHFKNCTSISGDLHILPVAFRGDSFTHTPPLDPQELDILKTVKEITGFLLIQAWPENRTDLHAFENLEIIRGRTKQHGQFSLAVVSLNITSLGLRSLKEISDGDVIISGNKNLCYANTINWKKLFGTSGQKTKIISNRGENSCKATGQVCHALCSPEGCWGPEPRDCVSCRNVSRGRECVDKCNLLEGEPREFVENSECIQCHPECLPQAMNITCTGRGPDNCIQCAHYIDGPHCVKTCPAGVMGENNTLVWKYADAGHVCHLCHPNCTYGCTGPGLEGCPTNGPKIPSIATGMVGALLLLLVVALGIGLFM

SEQ ID NO: 206703 - protein, 1055 aa, Artificial Sequence [sequence omitted]

SEQ ID NO: 206704 - protein, 1062 aa, Artificial Sequence
  Description of Artificial Sequence: Synthetic Chimeric Antigen Receptor
MLLLVTSLLLCELPHPAFLLIPQEQLVESGGRLVTPGGSLTLSCKASGFDFSAYYMSWVRQAPGKGLEWIATIYPSSGKTYYATWVNGRFTISSDNAQNTVDLQMNSLTAADRATYFCARDSYADDGALFNIWGPGTLVTISSGGGGSGGGGSGGGGSELVLTQSPSVSAALGSPAKITCTLSSAHKTDTIDWYQQLQGEAPRYLMQVQSDGSYTKRPGVPDRFSGSSSGADRYLIIPSVQADDEADYYCGADYIGGYVFGGGTQLTVTGESKYGPPCPPCPAPEFLGGPSVFLFPPKPKDTLMISRTPEVTCVVVDVSQEDPEVQFNWYVDGVEVHNAKTKPREEQFNSTYRVVSVLTVLHQDWLNGKEYKCKVSNKGLPSSIEKTISKAKGQPREPQVYTLPPSQEEMTKNQVSLTCLVKGFYPSDIAVEWESNGQPENNYKTTPPVLDSDGSFFLYSRLTVDKSRWQEGNVFSCSVMHEALHNHYTQKSLSLSLGKMFWVLVVVGGVLACYSLLVTVAFIIFWVKRGRKKLLYIFKQPFMRPVQTTQEEDGCSCRFPEEEEGGCELRVKFSRSADAPAYQQGQNQLYNELNLGRREEYDVLDKRRGRDPEMGGKPRRKNPQEGLYNELQKDKMAEAYSEIGMKGERRRGKGHDGLYQGLSTATKDTYDALHMQALPPRLEGGGEGRGSLLTCGDVEENPGPRMLLLVTSLLLCELPHPAFLLIPRKVCNGIGIGEFKDSLSINATNIKHFKNCTSISGDLHILPVAFRGDSFTHTPPLDPQELDILKTVKEITGFLLIQAWPENRTDLHAFENLEIIRGRTKQHGQFSLAVVSLNITSLGLRSLKEISDGDVIISGNKNLCYANTINWKKLFGTSGQKTKIISNRGENSCKATGQVCHALCSPEGCWGPEPRDCVSCRNVSRGRECVDKCNLLEGEPREFVENSECIQCHPECLPQAMNITCTGRGPDNCIQCAHYIDGPHCVKTCPAGVMGENNTLVWKYADAGHVCHLCHPNCTYGCTGPGLEGCPTNGPKIPSIATGMVGALLLLLVVALGIGLFM

SEQ ID NO: 206705 - protein, 1124 aa, Artificial Sequence
  Description of Artificial Sequence: Synthetic Chimeric Antigen Receptor
MSLPVTALLLPLALLLHAARPDIQMTQTTSSLSASLGDRVTISCRASQDISKYLNWYQQKPDGTVKLLIYHTSRLHSGVPSRFSGSGSGTDYSLTISNLEQEDIATYFCQQGNTLPYTFGGGTKLEITKAGGGGSGGGGSGGGGSGGGGSEVKLQESGPGLVAPSQSLSVTCTVSGVSLPDYGVSWIRQPPRKGLEWLGVIWGSETTYYNSALKSRLTIIKDNSKSQVFLKMNSLQTDDTAIYYCAKHYYYGGSYAMDYWGQGTSVTVSSDPTTTPAPRPPTPAPTIASQPLSLRPEACRPAAGGAVHTRGLDFACDIFVWLVWGGVLACYSLLVTVAFIIFWVRRVKFSRSADAPAYQQGQNQLYNELNLGRREEYDVLDKRRGRDPEMGGKPRRKNPQEGLYNELQKDKMAEAYSEIGMKGERRRGKGHDGLYQGLSTATKDTYDALHMQALPPRRAEGRGSLLTCGDVEENPGPMAVPTQVLGLLLLWLTDARCDIQMTQSPSSLSASVGDRVTITCRASEDIYFNLVWYQQKPGKAPKLLIYDTNRLADGVPSRFSGSGSGTQYTLTISSLQPEDFATYYCQHYKNYPLTFGQGTKLEIKRSGGGGSGGGGSGGGGSGGGGSRSEVQLVESGGGLVQPGGSLRLSCAASGFTLSNYGMHWIRQAPGKGLEWVSSISLNGGSTYYRDSVKGRFTISRDNAKSTLYLQMNSLRAEDTAVYYCAAQDAYTGGYFDYWGQGTLVTVSSMDPAEPKSPDKTHTCPPCPAPPVAGPSVFLFPPKPKDTLMIARTPEVTCVWDVSHEDPEVKFNWYVDGVEVHNAKTKPREEQYNSTYRWSVLTVLHQDWLNGKEYKCKVSNKALPAPIEKTISKAKGQPREPQVYTLPPSRDELTKNQVSLTCLVKGFYPSDIAVEWESNGQPENNYKTTPPVLDSDGSFFLYSKLTVDKSRWQQGNVFSCSVMHEALHNHYTQKSLSLSPGKKDPKFWVLVWGGVLACYSLLVTVAFIIFWVRSRVFSRSADAPAYQQGQNQLYNELNLGRREEYDVLDKRRGRDPEMGGKPRRKNPQEGLYNELQKDKMAEAYSEIGMKGERRRGKGHDGLYQGLSTATKDTYDALHMQALPPR

SEQ ID NO: 206706 - protein, 486 aa, Artificial Sequence
  Description of Artificial Sequence: Synthetic Chimeric Antigen Receptor
MALPVTALLLPLALLLHAARPQVQLQESGPGLVKPSETLSLTCTVSGVSLPDYGVSWIRQPPGKGLEWIGVIWGSETTYYSSSLKSRVTISKDNSKNQVSLKLSSVTAADTAVYYCAKHYYYGGSYAMDYWGQGTLVTVSSGGGGSGGGGSGGGGSEIVMTQSPATLSLSPGERATLSCRASQDISKYLNWYQQKPGQAPRLLIYHTSRLHSGIPARFSGSGSGTDYTLTISSLQPEDFAVYFCQQGNTLPYTFGQGTKLEIKTTTPAPRPPTPAPTIASQPLSLRPEACRPAAGGAVHTRGLDFACDIYIWAPLAGTCGVLLLSLVITLYCKRGRKKLLYIFKQPFMRPVQTTQEEDGCSCRFPEEEEGGCELRVKFSRSADAPAYKQGQNQLYNELNLGRREEYDVLDKRRGRDPEMGGKPRRKNPQEGLYNELQKDKMAEAYSEIGMKGERRRGKGHDGLYQGLSTATKDTYDALHMQALPPR

SEQ ID NO: 206707 - protein, 491 aa, Artificial Sequence
  Description of Artificial Sequence: Synthetic Chimeric Antigen Receptor
MALPVTALLLPLALLLHAARPEIVMTQSPATLSLSPGERATLSCRASQDISKYLNWYQQKPGQAPRLLIYHTSRLHSGIPARFSGSGSGTDYTLTISSLQPEDFAVYFCQQGNTLPYTFGQGTKLEIKGGGGSGGGGSGGGGSGGGGSQVQLQESGPGLVKPSETLSLTCTVSGVSLPDYGVSWIRQPPGKGLEWIGVIWGSETTYYSSSLKSRVTISKDNSKNQVSLKLSSVTAADTAVYYCAKHYYYGGSYAMDYWGQGTLVTVSSTTTPAPRPPTPAPTIASQPLSLRPEACRPAAGGAVHTRGLDFACDIYIWAPLAGTCGVLLLSLVITLYCKRGRKKLLYIFKQPFMRPVQTTQEEDGCSCRFPEEEEGGCELRVKFSRSADAPAYKQGQNQLYNELNLGRREEYDVLDKRRGRDPEMGGKPRRKNPQEGLYNELQKDKMAEAYSEIGMKGERRRGKGHDGLYQGLSTATKDTYDALHMQALPPR

SEQ ID NO: 206708 - protein, 491 aa, Artificial Sequence
  Description of Artificial Sequence: Synthetic Chimeric Antigen Receptor
MALPVTALLLPLALLLHAARPEIVMTQSPATLSLSPGERATLSCRASQDISKYLNWYQQKPGQAPRLLIYHTSRLHSGIPARFSGSGSGTDYTLTISSLQPEDFAVYFCQQGNTLPYTFGQGTKLEIKGGGGSGGGGSGGGGSGGGGSQVQLQESGPGLVKPSETLSLTCTVSGVSLPDYGVSWIRQPPGKGLEWIGVIWGSETTYYQSSLKSRVTISKDNSKNQVSLKLSSVTAADTAVYYCAKHYYYGGSYAMDYWGQGTLVTVSSTTTPAPRPPTPAPTIASQPLSLRPEACRPAAGGAVHTRGLDFACDIYIWAPLAGTCGVLLLSLVITLYCKRGRKKLLYIFKQPFMRPVQTTQEEDGCSCRFPEEEEGGCELRVKFSRSADAPAYKQGQNQLYNELNLGRREEYDVLDKRRGRDPEMGGKPRRKNPQEGLYNELQKDKMAEAYSEIGMKGERRRGKGHDGLYQGLSTATKDTYDALHMQALPPR

SEQ ID NO: 206709 - protein, 491 aa, Artificial Sequence
  Description of Artificial Sequence: Synthetic Chimeric Antigen Receptor
MALPVTALLLPLALLLHAARPQVQLQESGPGLVKPSETLSLTCTVSGVSLPDYGVSWIRQPPGKGLEWIGVIWGSETTYYSSSLKSRVTISKDNSKNQVSLKLSSVTAADTAVYYCAKHYYYGGSYAMDYWGQGTLVTVSSGGGGSGGGGSGGGGSGGGGSEIVMTQSPATLSLSPGERATLSCRASQDISKYLNWYQQKPGQAPRLLIYHTSRLHSGIPARFSGSGSGTDYTLTISSLQPEDFAVYFCQQGNTLPYTFGQGTKLEIKTTTPAPRPPTPAPTIASQPLSLRPEACRPAAGGAVHTRGLDFACDIYIWAPLAGTCGVLLLSLVITLYCKRGRKKLLYIFKQPFMRPVQTTQEEDGCSCRFPEEEEGGCELRVKFSRSADAPAYKQGQNQLYNELNLGRREEYDVLDKRRGRDPEMGGKPRRKNPQEGLYNELQKDKMAEAYSEIGMKGERRRGKGHDGLYQGLSTATKDTYDALHMQALPPR

SEQ ID NO: 206710 - protein, 491 aa, Artificial Sequence
  Description of Artificial Sequence: Synthetic Chimeric Antigen Receptor
MALPVTALLLPLALLLHAARPQVQLQESGPGLVKPSETLSLTCTVSGVSLPDYGVSWIRQPPGKGLEWIGVIWGSETTYYQSSLKSRVTISKDNSKNQVSLKLSSVTAADTAVYYCAKHYYYGGSYAMDYWGQGTLVTVSSGGGGSGGGGSGGGGSGGGGSEIVMTQSPATLSLSPGERATLSCRASQDISKYLNWYQQKPGQAPRLLIYHTSRLHSGIPARFSGSGSGTDYTLTISSLQPEDFAVYFCQQGNTLPYTFGQGTKLEIKTTTPAPRPPTPAPTIASQPLSLRPEACRPAAGGAVHTRGLDFACDIYIWAPLAGTCGVLLLSLVITLYCKRGRKKLLYIFKQPFMRPVQTTQEEDGCSCRFPEEEEGGCELRVKFSRSADAPAYKQGQNQLYNELNLGRREEYDVLDKRRGRDPEMGGKPRRKNPQEGLYNELQKDKMAEAYSEIGMKGERRRGKGHDGLYQGLSTATKDTYDALHMQALPPR

SEQ ID NO: 206711 - protein, 491 aa, Artificial Sequence
  Description of Artificial Sequence: Synthetic Chimeric Antigen Receptor
MALPVTALLLPLALLLHAARPQVQLQESGPGLVKPSETLSLTCTVSGVSLPDYGVSWIRQPPGKGLEWIGVIWGSETTYYNSSLKSRVTISKDNSKNQVSLKLSSVTAADTAVYYCAKHYYYGGSYAMDYWGQGTLVTVSSGGGGSGGGGSGGGGSGGGGSEIVMTQSPATLSLSPGERATLSCRASQDISKYLNWYQQKPGQAPRLLIYHTSRLHSGIPARFSGSGSGTDYTLTISSLQPEDFAVYFCQQGNTLPYTFGQGTKLEIKTTTPAPRPPTPAPTIASQPLSLRPEACRPAAGGAVHTRGLDFACDIYIWAPLAGTCGVLLLSLVITLYCKRGRKKLLYIFKQPFMRPVQTTQEEDGCSCRFPEEEEGGCELRVKFSRSADAPAYKQGQNQLYNELNLGRREEYDVLDKRRGRDPEMGGKPRRKNPQEGLYNELQKDKMAEAYSEIGMKGERRRGKGHDGLYQGLSTATKDTYDALHMQALPPR

SEQ ID NO: 206712 - protein, 486 aa, Artificial Sequence
  Description of Artificial Sequence: Synthetic Chimeric Antigen Receptor
MALPVTALLLPLALLLHAARPEIVMTQSPATLSLSPGERATLSCRASQDISKYLNWYQQKPGQAPRLLIYHTSRLHSGIPARFSGSGSGTDYTLTISSLQPEDFAVYFCQQGNTLPYTFGQGTKLEIKGGGGSGGGGSGGGGSQVQLQESGPGLVKPSETLSLTCTVSGVSLPDYGVSWIRQPPGKGLEWIGVIWGSETTYYNSSLKSRVTISKDNSKNQVSLKLSSVTAADTAVYYCAKHYYYGGSYAMDYWGQGTLVTVSSTTTPAPRPPTPAPTIASQPLSLRPEACRPAAGGAVHTRGLDFACDIYIWAPLAGTCGVLLLSLVITLYCKRGRKKLLYIFKQPFMRPVQTTQEEDGCSCRFPEEEEGGCELRVKFSRSADAPAYKQGQNQLYNELNLGRREEYDVLDKRRGRDPEMGGKPRRKNPQEGLYNELQKDKMAEAYSEIGMKGERRRGKGHDGLYQGLSTATKDTYDALHMQALPPR

SEQ ID NO: 206713 - protein, 939 aa, Artificial Sequence
  Description of Artificial Sequence: Synthetic polypeptide
MALPVTALLLPLALLLHAARPGSRGVQVETISPGDGRTFPKRGQTCVVHYTGMLEDGKKMDSSRDRNKPFKFMLGKQEVIRGWEEGVAQMSVGQRAKLTISPDYAYGATGHPGIIPPHATLVFDVELLKLETRGVQVETISPGDGRTFPKRGQTCVVHYTGMLEDGKKMDSSRDRNKPFKFMLGKQEVIRGWEEGVAQMSVGQRAKLTISPDYAYGATGHPGIIPPHATLVFDVELLKLETRGVQVETISPGDGRTFPKRGQTCVVHYTGMLEDGKKMDSSRDRNKPFKFMLGKQEVIRGWEEGVAQMSVGQRAKLTISPDYAYGATGHPGIIPPHATLVFDVELLKLETRGVQVETISPGDGRTFPKRGQTCVVHYTGMLEDGKKMDSSRDRNKPFKFMLGKQEVIRGWEEGVAQMSVGQRAKLTISPDYAYGATGHPGIIPPHATLVFDVELLKLETSARNRRKRGSDIQMTQTTSSLSASLGDRVTISCRASQDISKYLNWYQQKPDGTVKLLIYHTSRLHSGVPSRFSGSGSGTDYSLTISNLEQEDIATYFCQQGNTLPYTFGGGTKLEITGGGGSGGGGSGGGGSEVKLQESGPGLVAPSQSLSVTCTVSGVSLPDYGVSWIRQPPRKGLEWLGVIWGSETTYYNSALKSRLTIIKDNSKSQVFLKMNSLQTDDTAIYYCAKHYYYGGSYAMDYWGQGTSVTVSSASTTTPAPRPPTPAPTIASQPLSLRPEACRPAAGGAVHTRGLDFACDSGIYIWAPLAGTCGVLLLSLVITLYCKRGRKKLLYIFKQPFMRPVQTTQEEDGCSCRFPEEEEGGCELRVKFSRSADAPAYQQGQNQLYNELNLGRREEYDVLDKRRGRDPEMGGKPRRKNPQEGLYNELQKDKMAEAYSEIGMKGERRRGKGHDGLYQGLSTATKDTYDALHMQALPPRZ

SEQ ID NO: 206714 - protein, 970 aa, Artificial Sequence
  Description of Artificial Sequence: Synthetic Chimeric Antigen Receptor
MLLLVTSLLLCELPHPAFLLIPDIQMTQTTSSLSASLGDRVTISCRASQDISKYLNWYQQKPDGTVKLLIYHTSRLHSGVPSRFSGSGSGTDYSLTISNLEQEDIATYFCQQGNTLPYTFGGGTKLEITGSTSGSGKPGSGEGSTKGEVKLQESGPGLVAPSQSLSVTCTVSGVSLPDYGVSWIRQPPRKGLEWLGVIWGSETTYYNSALKSRLTIIKDNSKSQVFLKMNSLQTDDTAIYYCAKHYYYGGSYAMDYWGQGTSVTVSSGGGGSEVQLQQSGAELVKPGASVKMSCKASGYTFTSYNMHWVKQTPGQGLEWIGAIYPGNGDTSYNQKFKGKATLTADKSSSTAYMQLSSLTSEDSADYYCARSNYYGSSYWFFDVWGAGTTVTVSSGSTSGGGSGGGSGGGGSSDIVLTQSPAILSASPGEKVTMTCRASSSVNYMDWYQKKPGSSPKPWIYATSNLASGVPARFSGSGSGTSYSLTISRVEAEDAATYYCQQWSFNPPTFGGGTKLEIKESKYGPPCPPCPAPEFLGGPSVFLFPPKPKDTLMISRTPEVTCVVVDVSQEDPEVQFNWYVDGVEVHNAKTKPREEQFNSTYRVVSVLTVLHQDWLNGKEYKCKVSNKGLPSSIEKTISKAKGQPREPQVYTLPPSQEEMTKNQVSLTCLVKGFYPSDIAVEWESNGQPENNYKTTPPVLDSDGSFFLYSRLTVDKSRWQEGNVFSCSVMHEALHNHYTQKSLSLSLGKMFWVLVVVGGVLACYSLLVTVAFIIFWVRSKRSRGGHSDYMNMTPRRPGPTRKHYQPYAPPRDFAAYRSKRGRKKLLYIFKQPFMRPVQTTQEEDGCSCRFPEEEEGGCELRVKFSRSADAPAYQQGQNQLYNELNLGRREEYDVLDKRRGRDPEMGGKPRRKNPQEGLYNELQKDKMAEAYSEIGMKGERRRGKGHDGLYQGLSTATKDTYDALHMQALPPR

SEQ ID NO: 206715 - protein, 1090 aa, Artificial Sequence
  Description of Artificial Sequence: Synthetic Chimeric Antigen Receptor
MLLLVTSLLLCELPHPAFLLIPMTQTTSSLSASLGDRVTISCRASQDISKYLNWYQQKPDGTVKLLIYHTSRLHSGVPSRFSGSGSGTDYSLTISNLEQEDIATYFCQQGNTLPYTFGGGTKLEITGSTSGSGKPGSGEGSTKGEVKLQESGPGLVAPSQSLSVTCTVSGVSLPDYGVSWIRQPPRKGLEWLGVIWGSETTYYNSALKSRLTIIKDNSKSQVFLKMNSLQTDDTAIYYCAKHYYYGGSYAMDYWGQGTSVTVSSGGGGSEVQLQQSGAELVKPGASVKMSCKASGYTFTSYNMHWVKQTPGQGLEWIGAIYPGNGDTSYNQKFKGKATLTADKSSSTAYMQLSSLTSEDSADYYCARSNYYGSSYWFFDVWGAGTTVTVSSGSTSGGGSGGGSGGGGSSDIVLTQSPAILSASPGEKVTMTCRASSSVNYMDWYQKKPGSSPKPWIYATSNLASGVPARFSGSGSGTSYSLTISRVEAEDAATYYCQQWSFNPPTFGGGTKLEIKESKYGPPCPPCPMFWVLVVVGGVLACYSLLVTVAFIIFWVKRGRKKLLYIFKQPFMRPVQTTQEEDGCSCRFPEEEEGGCELRVKFSRSADAPAYQQGQNQLYNELNLGRREEYDVLDKRRGRDPEMGGKPRRKNPQEGLYNELQKDKMAEAYSEIGMKGERRRGKGHDGLYQGLSTATKDTYDALHMQALPPRLEGGGEGRGSLLTCGDVEENPGPRMLLLVTSLLLCELPHPAFLLIPRKVCNGIGIGEFKDSLSINATNIKHFKNCTSISGDLHILPVAFRGDSFTHTPPLDPQELDILKTVKEITGFLLIQAWPENRTDLHAFENLEIIRGRTKQHGQFSLAVVSLNITSLGLRSLKEISDGDVIISGNKNLCYANTINWKKLFGTSGQKTKIISNRGENSCKATGQVCHALCSPEGCWGPEPRDCVSCRNVSRGRECVDKCNLLEGEPREFVENSECIQCHPECLPQAMNITCTGRGPDNCIQCAHYIDGPHCVKTCPAGVMGENNTLVWKYADAGHVCHLCHPNCTYGCTGPGLEGCPTNGPKIPSIATGMVGALLLLLVVALGIGLFM

SEQ ID NO: 206716 - protein, 1133 aa, Artificial Sequence
  Description of Artificial Sequence: Synthetic Chimeric Antigen Receptor
MLLLVTSLLLCELPHPAFLLIPDIQMTQTTSSLSASLGDRVTISCRASQDISKYLNWYQQKPDGTVKLLIYHTSRLHSGVPSRFSGSGSGTDYSLTISNLEQEDIATYFCQQGNTLPYTFGGGTKLEITGSTSGSGKPGSGEGSTKGEVKLQESGPGLVAPSQSLSVTCTVSGVSLPDYGVSWIRQPPRKGLEWLGVIWGSETTYYNSALKSRLTIIKDNSKSQVFLKMNSLQTDDTAIYYCAKHYYYGGSYAMDYWGQGTSVTVSSGGGGSEVQLQQSGAELVKPGASVKMSCKASGYTFTSYNMHWVKQTPGQGLEWIGAIYPGNGDTSYNQKFKGKATLTADKSSSTAYMQLSSLTSEDSADYYCARSNYYGSSYWFFDVWGAGTTVTVSSGSTSGGGSGGGSGGGGSSDIVLTQSPAILSASPGEKVTMTCRASSSVNYMDWYQKKPGSSPKPWIYATSNLASGVPARFSGSGSGTSYSLTISRVEAEDAATYYCQQWSFNPPTFGGGTKLEIKESKYGPPCPPCPKPTTTPAPRPPTPAPTIASQPLSLRPEACRPAAGGAVHTRGLDFACDIYIWAPLAGTCGVLLLSLVITKRGRKKLLYIFKQPFMRPVQTTQEEDGCSCRFPEEEEGGCELRVKFSRSADAPAYQQGQNQLYNELNLGRREEYDVLDKRRGRDPEMGGKPRRKNPQEGLYNELQKDKMAEAYSEIGMKGERRRGKGHDGLYQGLSTATKDTYDALHMQALPPRLEGGGEGRGSLLTCGDVEENPGPRMLLLVTSLLLCELPHPAFLLIPRKVCNGIGIGEFKDSLSINATNIKHFKNCTSISGDLHILPVAFRGDSFTHTPPLDPQELDILKTVKEITGFLLIQAWPENRTDLHAFENLEIIRGRTKQHGQFSLAVVSLNITSLGLRSLKEISDGDVIISGNKNLCYANTINWKKLFGTSGQKTKIISNRGENSCKATGQVCHALCSPEGCWGPEPRDCVSCRNVSRGRECVDKCNLLEGEPREFVENSECIQCHPECLPQAMNITCTGRGPDNCIQCAHYIDGPHCVKTCPAGVMGENNTLVWKYADAGHVCHLCHPNCTYGCTGPGLEGCPTNGPKIPSIATGMVGALLLLLVVALGIGLFM

SEQ ID NO: 206717 - protein, 727 aa, Artificial Sequence
  Description of Artificial Sequence: Synthetic Chimeric Antigen Receptor
MVLLVTSLLLCELPHPAFLLIPDTEVQLVESGGGLVKPGGSLKLSCAASGFAFSIYDMSWVRQTPEKRLEWVAYISSGGGTYYPDTVKGRFTISRDNAKNTLYLQMSSLKSEDTAMYYCARHSGYGTHWGVLFAYWGQGTLVTVSAGGGGSGGGGSGGGGSDIQMTQTTSSLSASLGDRVTISCRASQDISNYLNWYQQKPDGTVKLLIYYTSILHSGVPSRFSGSGSGTDYSLTISNLEQEDFATYFCQQGNTLPWTFGGGTKLEIKAEPKSCDKTHTCPPCPAPELLGGPSVFLFPPKPKDTLMISRTPEVTCVVVDVSHEDPEVKFNWYVDGVEVHNAKTKPREEQYNSTYRVVSVLTVLHQDWLNGKEYKCKVSNKALPAPIEKTISKAKGQPREPQVYTLPPSRDELTKNQVSLTCLVKGFYPSDIAVEWESNGQPENNYKTTPPVLDSDGSFFLYSKLTVDKSRWQQGNVFSCSVMHEALHNHYTQKSLSLSPGKKDPKAAAIEVMYPPPYLDNEKSNGTIIHVKGKHLCPSPLFPGPSKPFWVLVVVGGVLACYSLLVTVAFIIFWVRSKRSRLLHSDYMNMTPRRPGPTRKHYQPYAPPRDFAAYRSRVKFSRSADAPAYQQGQNQLYNELNLGRREEYDVLDKRRGRDPEMGGKPRRKNPQEGLYNELQKDKMAEAYSEIGMKGERRRGKGHDGLYQGLSTATKDTYDALHMQALPPR

SEQ ID NO: 206718 - protein, 266 aa, Artificial Sequence
  Description of Artificial Sequence: Synthetic Chimeric Antigen Receptor
METDTLLLWVLLLWVPGSTGDIVLTQSPAILSASPGEKVTMTCRASSSVNYMDWYQKKPGSSPKPWIYATSNLASGVPARFSGSGSGTSYSLTISRVEAEDAATYYCQQWSFNPPTFGGGTKLEIKGSTSGGGSGGGSGGGGSSEVQLQQSGAELVKPGASVKMSCKASGYTFTSYNMHWVKQTPGQGLEWIGAIYPGNGDTSYNQKFKGKATLTADKSSSTAYMQLSSLTSEDSADYYCARSNYYGSSYWFFDVWGAGTTVTVSS

SEQ ID NO: 206719 - protein, 529 aa, Artificial Sequence
  Description of Artificial Sequence: Synthetic Chimeric Antigen Receptor
MALPVTALLLPLALLLHAARPDIVMTQSPATLSVTPGDRVSLSCRASQSISDYLHWYQQKSHESPRLLIKYASQSISGIPSRFSGSGSGSDFTLSINSVEPEDVGVYYCQNGHSFPLTFGAGTKLELRRGGGGSGGGGSGGGGSQVQLQQPGTELVRPGSSVKLSCKASGYTFTSYWVNWVKQRPDQGLEWIGRIDPYDSETHYNQKFTDKAISTIDTSSNTAYMQLSTLTSDASAVYYCSRSPRDSSTNLADWGQGTLVTVSSTTTPAPRPPTPAPTIASQPLSLRPEACRPAAGGAVHTRGLDFACDIYIWAPLAGTCGVLLLSLVITLYCRSKRSRLLHSDYMNMTPRRPGPTRKHYQPYAPPRDFAAYRSKRGRKKLLYIFKQPFMRPVQTTQEEDGCSCRFPEEEEGGCELRVKFSRSADAPAYQQGQNQLYNELNLGRREEYDVLDKRRGRDPEMGGKPQRRKNPQEGLYNELQKDKMAEAYSEIGMKGERRRGKGHDGLYQGLSTATKDTYDALHMQALPPR

SEQ ID NO: 206720 - protein, 389 aa, Artificial Sequence
  Description of Artificial Sequence: Synthetic Chimeric Antigen Receptor
MALPVTALLLPLALLLHAARPGSGSGAQAAEVQLVESGGGLVQPGRSLRLSCAASGFTFNDYAMHWVRQAPGKGLEWVSTISWNSGSIGYADSVKGRFTISRDNAKKSLYLQMNSLRAEDTALYYCAKDIQYGNYYYGMDVWGQGTTVTVSSGGGGSGGGGSGGGGSEIVLTQSPATLSLSPGERATLSCRASQSVSSYLAWYQQKPGQAPRLLIYDASNRATGIPARFSGSGSGTDFTLTISSLEPEDFAVYYCQQRSNWPITFGQGTRLEIKRSDPASGAGSGSGSAIELLPVPGAKKSAKLYIPYIILTIIILTIVGFIWLLKVNGCRKYKLNKTESTPVVEEDEMQPYASYTEKNNPLYDTTNKVKASEALQSEVDTDLHTLSHG

SEQ ID NO: 206721 - protein, 381 aa, Artificial Sequence
  Description of Artificial Sequence: Synthetic Chimeric Antigen Receptor
MALPVTALLLPLALLLHAARPGSGSGAQAAEVQLVESGGGLVQPGRSLRLSCAASGFTFNDYAMHWVRQAPGKGLEWVSTISWNSGSIGYADSVKGRFTISRDNAKKSLYLQMNSLRAEDTALYYCAKDIQYGNYYYGMDVWGQGTTVTVSSGGGGSGGGGSGGGGSEIVLTQSPATLSLSPGERATLSCRASQSVSSYLAWYQQKPGQAPRLLIYDASNRATGIPARFSGSGSGTDFTLTISSLEPEDFAVYYCQQRSNWPITFGQGTRLEIKRSDPASGAGSGSGSAVKEGPPSEHSGISRNAIIFLVLGILVFLILLGIGIYFYWSKCSREVLWHCHLCPSSTEHASASANGHVSYSAVSRENSSSQDPQTEGTRSHG

SEQ ID NO: 206722 - protein, 389 aa, Artificial Sequence
  Description of Artificial Sequence: Synthetic Chimeric Antigen Receptor
MALPVTALLLPLALLLHAARPGSGSGAQAAEVQLVESGGGLVQPGRSLRLSCAASGFTFNDYAMHWVRQAPGKGLEWVSTISWNSGSIGYADSVKGRFTISRDNAKKSLYLQMNSLRAEDTALYYCAKDIQYGNYYYGMDVWGQGTTVTVSSGGGGSGGGGSGGGGSEIVLTQSPATLSLSPGERATLSCRASQSVSSYLAWYQQKPGQAPRLLIYDASNRATGIPARFSGSGSGTDFTLTISSLEPEDFAVYYCQQRSNWPITFGQGTRLEIKRSDPASGAGSGSGSAVQAPSSSPMGIIVAVVTGIAVAAIVAAVVALIYCRKKRISALPGYPECREMGETLPEKPANPTNPDEADKVGAENTITYSLLMHPDALEEPDDQNRISHG

SEQ ID NO: 206723 - protein, 407 aa, Artificial Sequence
  Description of Artificial Sequence: Synthetic Chimeric Antigen Receptor
MALPVTALLLPLALLLHAARPGSGSGAQAAEVQLVESGGGLVQPGRSLRLSCAASGFTFNDYAMHWVRQAPGKGLEWVSTISWNSGSIGYADSVKGRFTISRDNAKKSLYLQMNSLRAEDTALYYCAKDIQYGNYYYGMDVWGQGTTVTVSSGGGGSGGGGSGGGGSEIVLTQSPATLSLSPGERATLSCRASQSVSSYLAWYQQKPGQAPRLLIYDASNRATGIPARFSGSGSGTDFTLTISSLEPEDFAVYYCQQRSNWPITFGQGTRLEIKRSDPASGAGSGSGSASFRALPHAWSDPSDPLPVSVTGNSRYLHALIGTSVVIIPFAILLFFLLHRWCANKKNAVVMDQEPAGNRTVNREDSDEQDPQEVTYAQLNHCVFTQRKITRPSQRPKTPPTDTSVSHG

SEQ ID NO: 206724 - protein, 412 aa, Artificial Sequence
  Description of Artificial Sequence: Synthetic Chimeric Antigen Receptor
MALPVTALLLPLALLLHAARPGSGSGAQAAEVQLVESGGGLVQPGRSLRLSCAASGFTFNDYAMHWVRQAPGKGLEWVSTISWNSGSIGYADSVKGRFTISRDNAKKSLYLQMNSLRAEDTALYYCAKDIQYGNYYYGMDVWGQGTTVTVSSGGGGSGGGGSGGGGSEIVLTQSPATLSLSPGERATLSCRASQSVSSYLAWYQQKPGQAPRLLIYDASNRATGIPARFSGSGSGTDFTLTISSLEPEDFAVYYCQQRSNWPITFGQGTRLEIKRSDPASGAGSGSGSALFVHWKPEGRAGGVLGAVWGASITTLVFLCVCFIFRVKTRRKKAAQPVQNTDDVNPVMVSGSRGHQHQFQTGIVSDHPAEAGPISEDEQELHYAVLHFHKVQPQEPKVTDTEYSEIKIHKSHG

SEQ ID NO: 206725 - protein, 413 aa, Artificial Sequence
  Description of Artificial Sequence: Synthetic Chimeric Antigen Receptor
MALPVTALLLPLALLLHAARPGSGSGAQAAEVQLVESGGGLVQPGRSLRLSCAASGFTFNDYAMHWVRQAPGKGLEWVSTISWNSGSIGYADSVKGRFTISRDNAKKSLYLQMNSLRAEDTALYYCAKDIQYGNYYYGMDVWGQGTTVTVSSGGGGSGGGGSGGGGSEIVLTQSPATLSLSPGERATLSCRASQSVSSYLAWYQQKPGQAPRLLIYDASNRATGIPARFSGSGSGTDFTLTISSLEPEDFAVYYCQQRSNWPITFGQGTRLEIKRSDPASGAGSGSGSAGPDGYRRDLMTAGVLWGLFGVLGFTGVALLLYALFHKISGESSATNEPRGASRPNPQEFTYSSPTPDMEELQPVYVNVGSVDVDVVYSQVWSMQQPESSANIRTLLENKDSQVIYSSVKKSSHG

SEQ ID NO: 206726 - protein, 415 aa, Artificial Sequence
  Description of Artificial Sequence: Synthetic Chimeric Antigen Receptor
MALPVTALLLPLALLLHAARPGSGSGAQAAEVQLVESGGGLVQPGRSLRLSCAASGFTFNDYAMHWVRQAPGKGLEWVSTISWNSGSIGYADSVKGRFTISRDNAKKSLYLQMNSLRAEDTALYYCAKDIQYGNYYYGMDVWGQGTTVTVSSGGGGSGGGGSGGGGSEIVLTQSPATLSLSPGERATLSCRASQSVSSYLAWYQQKPGQAPRLLIYDASNRATGIPARFSGSGSGTDFTLTISSLEPEDFAVYYCQQRSNWPITFGQGTRLEIKRSDPASGAGSGSGSAPGHIRLYVVEKENLPVFPVWVVVGIVTAVVLGLTLLISMILAVLYRRKNSKRDYTGCSTSESLSPVKQAPRKSPSDTEGLVKSLPSGSHQGPVIYAQLDHSGGHHSDKINKSESVVYADIRKNSHG

SEQ ID NO: 206727 - protein, 419 aa, Artificial Sequence
  Description of Artificial Sequence: Synthetic Chimeric Antigen Receptor
MALPVTALLLPLALLLHAARPGSGSGAQAAEVQLVESGGGLVQPGRSLRLSCAASGFTFNDYAMHWVRQAPGKGLEWVSTISWNSGSIGYADSVKGRFTISRDNAKKSLYLQMNSLRAEDTALYYCAKDIQYGNYYYGMDVWGQGTTVTVSSGGGGSGGGGSGGGGSEIVLTQSPATLSLSPGERATLSCRASQSVSSYLAWYQQKPGQAPRLLIYDASNRATGIPARFSGSGSGTDFTLTISSLEPEDFAVYYCQQRSNWPITFGQGTRLEIKRSDPASGAGSGSGSALQSKATSGVTQGVVGGAGATALVFLSFCVIFVVVRSCRKKSARPAAGVGDTGIEDANAVRGSASQGPLTEPWAEDSPPDQPPPASARSSVGEGELQYASLSFQMVKPWDSRGQEATDTEYSEIKIHRSHG

SEQ ID NO: 206728 - protein, 422 aa, Artificial Sequence
  Description of Artificial Sequence: Synthetic Chimeric Antigen Receptor
MALPVTALLLPLALLLHAARPGSGSGAQAAEVQLVESGGGLVQPGRSLRLSCAASGFTFNDYAMHWVRQAPGKGLEWVSTISWNSGSIGYADSVKGRFTISRDNAKKSLYLQMNSLRAEDTALYYCAKDIQYGNYYYGMDVWGQGTTVTVSSGGGGSGGGGSGGGGSEIVLTQSPATLSLSPGERATLSCRASQSVSSYLAWYQQKPGQAPRLLIYDASNRATGIPARFSGSGSGTDFTLTISSLEPEDFAVYYCQQRSNWPITFGQGTRLEIKRSDPASGAGSGSGSAMPSTGGDSCPFCLKLLLPGLLLLLVVIILILAFWVLPKYKTRKAMRNNVPRDRGDTAMEVGIYANILEKQAKEESVPEVGSRPCVSTAQDEAKHSQELQYATPVFQEVAPREQEACDSYKSGYVYSELNFSHG

SEQ ID NO: 206729 - protein, 423 aa, Artificial Sequence
  Description of Artificial Sequence: Synthetic Chimeric Antigen Receptor
MALPVTALLLPLALLLHAARPGSGSGAQAAEVQLVESGGGLVQPGRSLRLSCAASGFTFNDYAMHWVRQAPGKGLEWVSTISWNSGSIGYADSVKGRFTISRDNAKKSLYLQMNSLRAEDTALYYCAKDIQYGNYYYGMDVWGQGTTVTVSSGGGGSGGGGSGGGGSEIVLTQSPATLSLSPGERATLSCRASQSVSSYLAWYQQKPGQAPRLLIYDASNRATGIPARFSGSGSGTDFTLTISSLEPEDFAVYYCQQRSNWPITFGQGTRLEIKRSDPASGAGSGSGSALQQEYTGKMRPVSGVLLGAVGGAGATALVFLSFCVIFIVVRSCRKKSARPAADVGDIGMKDANTIRGSASQGNLTESWADDNPRHHGLAAHSSGEEREIQYAPLSFHKGEPQDLSGQEATNNEYSEIKIPKSHG

SEQ ID NO: 206730 - protein, 425 aa, Artificial Sequence
  Description of Artificial Sequence: Synthetic Chimeric Antigen Receptor
MALPVTALLLPLALLLHAARPGSGSGAQAAEVQLVESGGGLVQPGRSLRLSCAASGFTFNDYAMHWVRQAPGKGLEWVSTISWNSGSIGYADSVKGRFTISRDNAKKSLYLQMNSLRAEDTALYYCAKDIQYGNYYYGMDVWGQGTTVTVSSGGGGSGGGGSGGGGSEIVLTQSPATLSLSPGERATLSCRASQSVSSYLAWYQQKPGQAPRLLIYDASNRATGIPARFSGSGSGTDFTLTISSLEPEDFAVYYCQQRSNWPITFGQGTRLEIKRSDPASGAGSGSGSALQNEYTGKMRPISGVTLGAFGGAGATALVFLYFCIIFVVVRSCRKKSARPAVGVGDTGMEDANAVRGSASQGPLIESPADDSPPHHAPPALATPSPEEGEIQYASLSFHKARPQYPQEQEAIGYEYSEINIPKSHG

SEQ ID NO: 206731 - protein, 428 aa, Artificial Sequence
  Description of Artificial Sequence: Synthetic Chimeric Antigen Receptor
MALPVTALLLPLALLLHAARPGSGSGAQAAEVQLVESGGGLVQPGRSLRLSCAASGFTFNDYAMHWVRQAPGKGLEWVSTISWNSGSIGYADSVKGRFTISRDNAKKSLYLQMNSLRAEDTALYYCAKDIQYGNYYYGMDVWGQGTTVTVSSGGGGSGGGGSGGGGSEIVLTQSPATLSLSPGERATLSCRASQSVSSYLAWYQQKPGQAPRLLIYDASNRATGIPARFSGSGSGTDFTLTISSLEPEDFAVYYCQQRSNWPITFGQGTRLEIKRSDPASGAGSGSGSALNVTYVPQNPTTGIFPGDGSGKQETRAGVVHGAIGGAGVTALLALCLCLIFFIVKTHRRKAARTAVGRNDTHPTTGSASPKHQKKSKLHGPTETSSCSGAAPTVEMDEELHYASLNFHGMNPSKDTSTEYSEVRTQSHG

SEQ ID NO: 206732 - protein, 428 aa, Artificial Sequence
  Description of Artificial Sequence: Synthetic Chimeric Antigen Receptor
MALPVTALLLPLALLLHAARPGSGSGAQAAEVQLVESGGGLVQPGRSLRLSCAASGFTFNDYAMHWVRQAPGKGLEWVSTISWNSGSIGYADSVKGRFTISRDNAKKSLYLQMNSLRAEDTALYYCAKDIQYGNYYYGMDVWGQGTTVTVSSGGGGSGGGGSGGGGSEIVLTQSPATLSLSPGERATLSCRASQSVSSYLAWYQQKPGQAPRLLIYDASNRATGIPARFSGSGSGTDFTLTISSLEPEDFAVYYCQQRSNWPITFGQGTRLEIKRSDPASGAGSGSGSAPYEWSNSSDPLLVSVTGNPSNSWPSPTEPSSETGNPRHLHVLIGTSVVIILFILLLFFLLHRWCCNKKNAVVMDQEPAGNRTVNREDSDEQDPQEVTYAQLNHCVFTQRKITRPSQRPKTPPTDIIVYTELPNAEPSHG

SEQ ID NO: 206733 - protein, 430 aa, Artificial Sequence
  Description of Artificial Sequence: Synthetic Chimeric Antigen Receptor
MALPVTALLLPLALLLHAARPGSGSGAQAAEVQLVESGGGLVQPGRSLRLSCAASGFTFNDYAMHWVRQAPGKGLEWVSTISWNSGSIGYADSVKGRFTISRDNAKKSLYLQMNSLRAEDTALYYCAKDIQYGNYYYGMDVWGQGTTVTVSSGGGGSGGGGSGGGGSEIVLTQSPATLSLSPGERATLSCRASQSVSSYLAWYQQKPGQAPRLLIYDASNRATGIPARFSGSGSGTDFTLTISSLEPEDFAVYYCQQRSNWPITFGQGTRLEIKRSDPASGAGSGSGSALNFTVPTGARSNHLTSGVIEGLLSTLGPATVALLFCYGLKRKIGRRSARDPLRSLPSPLPQEFTYLNSPTPGQLQPIYENVNVVSGDEVYSLAYYNQPEQESVAAETLGTHMEDKVSLDIYSRLRKANITDVDYEDAMSHG

SEQ ID NO: 206734 - protein, 433 aa, Artificial Sequence
  Description of Artificial Sequence: Synthetic Chimeric Antigen Receptor
MALPVTALLLPLALLLHAARPGSGSGAQAAEVQLVESGGGLVQPGRSLRLSCAASGFTFNDYAMHWVRQAPGKGLEWVSTISWNSGSIGYADSVKGRFTISRDNAKKSLYLQMNSLRAEDTALYYCAKDIQYGNYYYGMDVWGQGTTVTVSSGGGGSGGGGSGGGGSEIVLTQSPATLSLSPGERATLSCRASQSVSSYLAWYQQKPGQAPRLLIYDASNRATGIPARFSGSGSGTDFTLTISSLEPEDFAVYYCQQRSNWPITFGQGTRLEIKRSDPASGAGSGSGSAVTVRETPGNRDGLVAAGATGGLLSALLLAVALLFHCWRRRKSGVGFLGDETRLPPAPGPGESSHSICPAQVELQSLYVDVHPKKGDLVYSEIQTTQLGEEEEANTSRTLLEDKDVSVVYSEVKTQHPDNSAGKISSKDEESSHG

SEQ ID NO: 206735 - protein, 434 aa, Artificial Sequence
  Description of Artificial Sequence: Synthetic Chimeric Antigen Receptor
MALPVTALLLPLALLLHAARPGSGSGAQAAEVQLVESGGGLVQPGRSLRLSCAASGFTFNDYAMHWVRQAPGKGLEWVSTISWNSGSIGYADSVKGRFTISRDNAKKSLYLQMNSLRAEDTALYYCAKDIQYGNYYYGMDVWGQGTTVTVSSGGGGSGGGGSGGGGSEIVLTQSPATLSLSPGERATLSCRASQSVSSYLAWYQQKPGQAPRLLIYDASNRATGIPARFSGSGSGTDFTLTISSLEPEDFAVYYCQQRSNWPITFGQGTRLEIKRSDPASGAGSGSGSAERRAEVPTAHPSPSPRPAGQFQTLVVGVVGGLLGSLVLLVWVLAVICSRAARGTIGARRTGQPLKEDPSAVPVFSVDYGELDFQWREKTPEPPVPCVPEQTEYATIVFPSGMGTSSPARRGSADGPRSAQPLRPEDGHCSWPLSH

SEQ ID NO: 206736 - protein, 435 aa, Artificial Sequence
  Description of Artificial Sequence: Synthetic Chimeric Antigen Receptor
MALPVTALLLPLALLLHAARPGSGSGAQAAEVQLVESGGGLVQPGRSLRLSCAASGFTFNDYAMHWVRQAPGKGLEWVSTISWNSGSIGYADSVKGRFTISRDNAKKSLYLQMNSLRAEDTALYYCAKDIQYGNYYYGMDVWGQGTTVTVSSGGGGSGGGGSGGGGSEIVLTQSPATLSLSPGERATLSCRASQSVSSYLAWYQQKPGQAPRLLIYDASNRATGIPARFSGSGSGTDFTLTISSLEPEDFAVYYCQQRSNWPITFGQGTRLEIKRSDPASGAGSGSGSALYITGLTANRSGPFATGVAGGLLSIAGLAAGALLLYCWLSRKAGRKPASDPARSPPDSDSQEPTYHNVPAWEELQPVYTNANPRGENVVYSEVRIIQEKKKHAVASDPRHLRNKGSPIIYSEVKVASTPVSGSLFLASSAPHRSHG

SEQ ID NO: 206737 - protein, 435 aa, Artificial Sequence
  Description of Artificial Sequence: Synthetic Chimeric Antigen Receptor
MALPVTALLLPLALLLHAARPGSGSGAQAAEVQLVESGGGLVQPGRSLRLSCAASGFTFNDYAMHWVRQAPGKGLEWVSTISWNSGSIGYADSVKGRFTISRDNAKKSLYLQMNSLRAEDTALYYCAKDIQYGNYYYGMDVWGQGTTVTVSSGGGGSGGGGSGGGGSEIVLTQSPATLSLSPGERATLSCRASQSVSSYLAWYQQKPGQAPRLLIYDASNRATGIPARFSGSGSGTDFTLTISSLEPEDFAVYYCQQRSNWPITFGQGTRLEIKRSDPASGAGSGSGSAPYEWSNSSDPLLVSVIGNPSNSWPSPTEPSSKTGNPRHLHILIGTSVVIILFILLFFLLHRWCSNKKNAAVMDQESAGNRTANSEDSDEQDPQEVTYTQLNHCVFTQRKITRPSQRPKTPPTDIIVYAELPNAESRSKVVSCPSHG

SEQ ID NO: 206738 - protein, 436 aa, Artificial Sequence
  Description of Artificial Sequence: Synthetic Chimeric Antigen Receptor
MALPVTALLLPLALLLHAARPGSGSGAQAAEVQLVESGGGLVQPGRSLRLSCAASGFTFNDYAMHWVRQAPGKGLEWVSTISWNSGSIGYADSVKGRFTISRDNAKKSLYLQMNSLRAEDTALYYCAKDIQYGNYYYGMDVWGQGTTVTVSSGGGGSGGGGSGGGGSEIVLTQSPATLSLSPGERATLSCRASQSVSSYLAWYQQKPGQAPRLLIYDASNRATGIPARFSGSGSGTDFTLTISSLEPEDFAVYYCQQRSNWPITFGQGTRLEIKRSDPASGAGSGSGSAPYEWSDPSDPLLVSVTGNPSSSWPSPTEPSSKSGNPRHLHILIGTSVVIILFILLLFFLLHLWCSNKKNAAVMDQEPAGNRTANSEDSDEQDPEEVTYAQLDHCVFTQRKITRPSQRPKTPPTDTILYTELPNAKPRSKVVSCPSHG

SEQ ID NO: 206739 - protein, 439 aa, Artificial Sequence
  Description of Artificial Sequence: Synthetic Chimeric Antigen Receptor
MALPVTALLLPLALLLHAARPGSGSGAQAAEVQLVESGGGLVQPGRSLRLSCAASGFTFNDYAMHWVRQAPGKGLEWVSTISWNSGSIGYADSVKGRFTISRDNAKKSLYLQMNSLRAEDTALYYCAKDIQYGNYYYGMDVWGQGTTVTVSSGGGGSGGGGSGGGGSEIVLTQSPATLSLSPGERATLSCRASQSVSSYLAWYQQKPGQAPRLLIYDASNRATGIPARFSGSGSGTDFTLTISSLEPEDFAVYYCQQRSNWPITFGQGTRLEIKRSDPASGAGSGSGSAVRVILAPWKKGLIAVVIIGVIIALLIIAAKCYFLRKAKAKQMPVEMSRPAVPLLNSNNEKMSDPNMEANSHYGHNDDVGNHAMKPINDNKEPLNSDVQYTEVQVSSAESHKDLGKKDTETVYSEVRKAVPDAVESRYSRTEGSLDGTSHG

SEQ ID NO: 206740 - protein, 445 aa, Artificial Sequence
  Description of Artificial Sequence: Synthetic Chimeric Antigen Receptor
MALPVTALLLPLALLLHAARPGSGSGAQAAEVQLVESGGGLVQPGRSLRLSCAASGFTFNDYAMHWVRQAPGKGLEWVSTISWNSGSIGYADSVKGRFTISRDNAKKSLYLQMNSLRAEDTALYYCAKDIQYGNYYYGMDVWGQGTTVTVSSGGGGSGGGGSGGGGSEIVLTQSPATLSLSPGERATLSCRASQSVSSYLAWYQQKPGQAPRLLIYDASNRATGIPARFSGSGSGTDFTLTISSLEPEDFAVYYCQQRSNWPITFGQGTRLEIKRSDPASGAGSGSGSAQAVTTTTQRPSSMTTTWRLSSTTTTTGLRVTQGKRRSDSWHISLETAVGVAVAVTVLGIMILGLICLLRWRRRKGQQRTKATTPAREPFQNTEEPYENIRNEGQNTDPKLNPKDDGIVYASLALSSSTSPKAPPSHRPLKSPQNETLYSVLKASHG

SEQ ID NO: 206741 - protein, 447 aa, Artificial Sequence
  Description of Artificial Sequence: Synthetic Chimeric Antigen Receptor
MALPVTALLLPLALLLHAARPGSGSGAQAAEVQLVESGGGLVQPGRSLRLSCAASGFTFNDYAMHWVRQAPGKGLEWVSTISWNSGSIGYADSVKGRFTISRDNAKKSLYLQMNSLRAEDTALYYCAKDIQYGNYYYGMDVWGQGTTVTVSSGGGGSGGGGSGGGGSEIVLTQSPATLSLSPGERATLSCRASQSVSSYLAWYQQKPGQAPRLLIYDASNRATGIPARFSGSGSGTDFTLTISSLEPEDFAVYYCQQRSNWPITFGQGTRLEIKRSDPASGAGSGSGSAPCVWSNSSDPLLVSVTGNPSSSWPSPTEPSSKSGICRHLHVLIGTSVVIFLFILLLFFLLYRWCSNKKNAAVMDQEPAGDRTVNRQDSDEQDPQEVTYAQLDHCVFIQRKISRPSQRPKTPLTDTSVYTELPNAEPRSKVVSCPRAPQSGLEGVFSHG

SEQ ID NO: 206742 - protein, 447 aa, Artificial Sequence
  Description of Artificial Sequence: Synthetic Chimeric Antigen Receptor
MALPVTALLLPLALLLHAARPGSGSGAQAAEVQLVESGGGLVQPGRSLRLSCAASGFTFNDYAMHWVRQAPGKGLEWVSTISWNSGSIGYADSVKGRFTISRDNAKKSLYLQMNSLRAEDTALYYCAKDIQYGNYYYGMDVWGQGTTVTVSSGGGGSGGGGSGGGGSEIVLTQSPATLSLSPGERATLSCRASQSVSSYLAWYQQKPGQAPRLLIYDASNRATGIPARFSGSGSGTDFTLTISSLEPEDFAVYYCQQRSNWPITFGQGTRLEIKRSDPASGAGSGSGSALQNEGTGTSRPVSQVTLAAVGGAGATALAFLSFCIIFIIVRSCRKKSARPAAGVGDTGMEDAKAIRGSASQGPLTESWKDGNPLKKPPPAVAPSSGEEGELHYATLSFHKVKPQDPQGQEATDSEYSEIKIHKRETAETQACLRNHNPSSKEVRGSHG

SEQ ID NO: 206743 - protein, 463 aa, Artificial Sequence
  Description of Artificial Sequence: Synthetic Chimeric Antigen Receptor
MALPVTALLLPLALLLHAARPGSGSGAQAAEVQLVESGGGLVQPGRSLRLSCAASGFTFNDYAMHWVRQAPGKGLEWVSTISWNSGSIGYADSVKGRFTISRDNAKKSLYLQMNSLRAEDTALYYCAKDIQYGNYYYGMDVWGQGTTVTVSSGGGGSGGGGSGGGGSEIVLTQSPATLSLSPGERATLSCRASQSVSSYLAWYQQKPGQAPRLLIYDASNRATGIPARFSGSGSGTDFTLTISSLEPEDFAVYYCQQRSNWPITFGQGTRLEIKRSDPASGAGSGSGSAGTSRNRTGLTAAGITGLVLSILVLAAAAALLHYARARRKPGGLSATGTSSHSPSECQEPSSSRPSRIDPQEPTHSKPLAPMELEPMYSNANPGDSNPIYSQIWSIQHTKENSANCPMMHQEHEELTVLYSELKKTHPDDSAGEASSRGRAHEEDDEENYENVPRVLLASDHSHG

SEQ ID NO: 206744 - protein, 464 aa, Artificial Sequence
  Description of Artificial Sequence: Synthetic Chimeric Antigen Receptor
MALPVTALLLPLALLLHAARPGSGSGAQAAEVQLVESGGGLVQPGRSLRLSCAASGFTFNDYAMHWVRQAPGKGLEWVSTISWNSGSIGYADSVKGRFTISRDNAKKSLYLQMNSLRAEDTALYYCAKDIQYGNYYYGMDVWGQGTTVTVSSGGGGSGGGGSGGGGSEIVLTQSPATLSLSPGERATLSCRASQSVSSYLAWYQQKPGQAPRLLIYDASNRATGIPARFSGSGSGTDFTLTISSLEPEDFAVYYCQQRSNWPITFGQGTRLEIKRSDPASGAGSGSGSAGPSGDPSLSPTGSTPTPGPEDQPLTPTGLDPQSGLGRHLGVVTGVSVAFVLLLFLLLFLLLRHRHQSKHRTSAHFYRPAGAAGPEPKDQGLQKRASPVADIQEEILNAAVKDTQPKDGVEMDARAAASEAPQDVTYAQLHSLTLRREATEPPPSQEREPPAEPSIYAPLAIHSHG

SEQ ID NO: 206745 - protein, 467 aa, Artificial Sequence
  Description of Artificial Sequence: Synthetic Chimeric Antigen Receptor
MALPVTALLLPLALLLHAARPGSGSGAQAAEVQLVESGGGLVQPGRSLRLSCAASGFTFNDYAMHWVRQAPGKGLEWVSTISWNSGSIGYADSVKGRFTISRDNAKKSLYLQMNSLRAEDTALYYCAKDIQYGNYYYGMDVWGQGTTVTVSSGGGGSGGGGSGGGGSEIVLTQSPATLSLSPGERATLSCRASQSVSSYLAWYQQKPGQAPRLLIYDASNRATGIPARFSGSGSGTDFTLTISSLEPEDFAVYYCQQRSNWPITFGQGTRLEIKRSDPASGAGSGSGSAPYEWSDASDPLPVSVTGNPSSSWPSPTEPSFKTGIARHLHAVIRYSVAIILFTILPFFLLHRWCSKKKDAAVMNQEPAGHRTVNREDSDEQDPQEVTYAQLDHCIFTQRKITGPSQRSKRPSTDTSVCIELPNAEPRALSPAHEHHSQALMGSSRETTALSQTQLASSHVPAAGISHG

SEQ ID NO: 206746 - protein, 467 aa, Artificial Sequence
  Description of Artificial Sequence: Synthetic Chimeric Antigen Receptor
MALPVTALLLPLALLLHAARPGSGSGAQAAEVQLVESGGGLVQPGRSLRLSCAASGFTFNDYAMHWVRQAPGKGLEWVSTISWNSGSIGYADSVKGRFTISRDNAKKSLYLQMNSLRAEDTALYYCAKDIQYGNYYYGMDVWGQGTTVTVSSGGGGSGGGGSGGGGSEIVLTQSPATLSLSPGERATLSCRASQSVSSYLAWYQQKPGQAPRLLIYDASNRATGIPARFSGSGSGTDFTLTISSLEPEDFAVYYCQQRSNWPITFGQGTRLEIKRSDPASGAGSGSGSAPYEWSDPSDPLLVSVTGNSSSSSSSPTEPSSKTGIRRHLHILIGTSVAIILFIILFFFLLHCCCSNKKNAAVMDQEPAGDRTVNREDSDDQDPQEVTYAQLDHCVFTQTKITSPSQRPKTPPTDTTMYMELPNAKPRSLSPAHKHHSQALRGSSRETTALSQNRVASSHVPAAGISHG

SEQ ID NO: 206747 - protein, 471 aa, Artificial Sequence
  Description of Artificial Sequence: Synthetic Chimeric Antigen Receptor
MALPVTALLLPLALLLHAARPGSGSGAQAAEVQLVESGGGLVQPGRSLRLSCAASGFTFNDYAMHWVRQAPGKGLEWVSTISWNSGSIGYADSVKGRFTISRDNAKKSLYLQMNSLRAEDTALYYCAKDIQYGNYYYGMDVWGQGTTVTVSSGGGGSGGGGSGGGGSEIVLTQSPATLSLSPGERATLSCRASQSVSSYLAWYQQKPGQAPRLLIYDASNRATGIPARFSGSGSGTDFTLTISSLEPEDFAVYYCQQRSNWPITFGQGTRLEIKRSDPASGAGSGSGSAGPSMGSSPPPTGPISTPAGPEDQPLTPTGSDPQSGLGRHLGVVIGILVAVVLLLLLLLLLFLILRHRRQGKHWTSTQRKADFQHPAGAVGPEPTDRGLQWRSSPAADAQEENLYAAVKDTQPEDGVEMDTRAAASEAPQDVTYAQLHSLTLRRKATEPPPSQEREPPAEPSIYATLAIHSHG

SEQ ID NO: 206748 - protein, 496 aa, Artificial Sequence
  Description of Artificial Sequence: Synthetic Chimeric Antigen Receptor
MALPVTALLLPLALLLHAARPEVQLVESGAEVKKPGASVKVSCKASGYTFTGYYMHWVRQAPGQGLEWMGWINPNSGGTNYAQKFQGRVTMTRDTSISTAYMELSRLRSDDTAVYYCAREPASSSWYGYYYYMDVWGKGTLVTVSSGGGGSGGGGSGGGGSGGGGSDIQMTQSPSSLSASVGDRVTITCRASQSINTYLNWYQQKPGKPPKLLIYAASNLQSGVPSRFSGSGSGTHFTLTISSLQPDDFATYYCQQSYSSLLTFGGGTKLEIKTTTPAPRPPTPAPTIASQPLSLRPEACRPAAGGAVHTRGLDFACDIYIWAPLAGTCGVLLLSLVITLYCKRGRKKLLYIFKQPFMRPVQTTQEEDGCSCRFPEEEEGGCELRVKFSRSADAPAYKQGQNQLYNELNLGRREEYDVLDKRRGRDPEMGGKPRRKNPQEGLYNELQKDKMAEAYSEIGMKGERRRGKGHDGLYQGLSTATKDTYDALHMQALPPR

SEQ ID NO: 206749 - protein, 498 aa, Artificial Sequence
  Description of Artificial Sequence: Synthetic Chimeric Antigen Receptor
MALPVTALLLPLALLLHAARPGSGSGAQAAEVQLVESGGGLVQPGRSLRLSCAASGFTFNDYAMHWVRQAPGKGLEWVSTISWNSGSIGYADSVKGRFTISRDNAKKSLYLQMNSLRAEDTALYYCAKDIQYGNYYYGMDVWGQGTTVTVSSGGGGSGGGGSGGGGSEIVLTQSPATLSLSPGERATLSCRASQSVSSYLAWYQQKPGQAPRLLIYDASNRATGIPARFSGSGSGTDFTLTISSLEPEDFAVYYCQQRSNWPITFGQGTRLEIKRSDPASGAGSGSGSAKNESAASSTGKTPAAEETVTTILGMLASPYHYLIIIVVLVIILAVVVVGFSCRKKFISYLKGICSGGGGGPERVHRVLFRRRSCPSRVPGAEDNARNETLSNRYLQPTQVSEQEIQGQELAELTGVTVELPEEPQRLLEQAEAEGCQRRRLLVPVNDADSADISTLLDASATLEEGHAKETIQDQLVGSEKLFYEEDEAGSATSCLSHG

SEQ ID NO: 206750 - protein, 504 aa, Artificial Sequence
  Description of Artificial Sequence: Synthetic Chimeric Antigen Receptor
MALPVTALLLPLALLLHAARPGSGSGAQAAEVQLVESGGGLVQPGRSLRLSCAASGFTFNDYAMHWVRQAPGKGLEWVSTISWNSGSIGYADSVKGRFTISRDNAKKSLYLQMNSLRAEDTALYYCAKDIQYGNYYYGMDVWGQGTTVTVSSGGGGSGGGGSGGGGSEIVLTQSPATLSLSPGERATLSCRASQSVSSYLAWYQQKPGQAPRLLIYDASNRATGIPARFSGSGSGTDFTLTISSLEPEDFAVYYCQQRSNWPITFGQGTRLEIKRSDPASGAGSGSGSAGHSGGSSLPPTGPPSTPGLGRYLEVLIGVSVAFVLLLFLLLFLLLRRQRHSKHRTSDQRKTDFQRPAGAAETEPKDRGLLRRSSPAADVQEENLYAAVKDTQSEDRVELDSQSPHDEDPQAVTYAPVKHSSPRREMASPPSSLSGEFLDTKDRQVEEDRQMDTEAAASEASQDVTYAQLHSLTLRRKATEPPPSQEGEPPAEPSIYATLAIHSHG

SEQ ID NO: 206751 - protein, 513 aa, Artificial Sequence
  Description of Artificial Sequence: Synthetic Chimeric Antigen Receptor
MALPVTALLLPLALLLHAARPGSGSGAQAAEVQLVESGGGLVQPGRSLRLSCAASGFTFNDYAMHWVRQAPGKGLEWVSTISWNSGSIGYADSVKGRFTISRDNAKKSLYLQMNSLRAEDTALYYCAKDIQYGNYYYGMDVWGQGTTVTVSSGGGGSGGGGSGGGGSEIVLTQSPATLSLSPGERATLSCRASQSVSSYLAWYQQKPGQAPRLLIYDASNRATGIPARFSGSGSGTDFTLTISSLEPEDFAVYYCQQRSNWPITFGQGTRLEIKRSDPASGAGSGSGSAVYSLPQLLGPSCSWEAEGLHCRCSFRAWPAPSLCWRLEEKPLEGNSSQGSFKVNSSSPGPWANSSLILHGGLNSDLKVSCKAWNIYGSQSGSVLLLQGRSNLGTGVVPAALGGAGVMALLCICLCLIFFLIVKARRKQAAGRPEKMDDEDPIMGTITSGSRKKPWPDSPGDQASPPGDAPPLEEQKELHYASLSFSEMKSREPKDQEAPSTTEYSEIKTSKSHG

SEQ ID NO: 206752 - protein, 522 aa, Artificial Sequence
  Description of Artificial Sequence: Synthetic Chimeric Antigen Receptor
MALPVTALLLPLALLLHAARPGSGSGAQAAEVQLVESGGGLVQPGRSLRLSCAASGFTFNDYAMHWVRQAPGKGLEWVSTISWNSGSIGYADSVKGRFTISRDNAKKSLYLQMNSLRAEDTALYYCAKDIQYGNYYYGMDVWGQGTTVTVSSGGGGSGGGGSGGGGSEIVLTQSPATLSLSPGERATLSCRASQSVSSYLAWYQQKPGQAPRLLIYDASNRATGIPARFSGSGSGTDFTLTISSLEPEDFAVYYCQQRSNWPITFGQGTRLEIKRSDPASGAGSGSGSAGSLEGPRPSPTRSVSTAAGPEDQPLMPTGSVPHSGLRRHWEVLIGVLVVSILLLSLLLFLLLQHWRQGKHRTLAQRQADFQRPPGAAEPEPKDGGLQRRSSPAADVQGENFCAAVKNTQPEDGVEMDTRQSPHDEDPQAVTYAKVKHSRPRREMASPPSPLSGEFLDTKDRQAEEDRQMDTEAAASEAPQDVTYAQLHSFTLRQKATEPPPSQEGASPAEPSVYATLAIHSHG

SEQ ID NO: 206753 - protein, 531 aa, Artificial Sequence
  Description of Artificial Sequence: Synthetic Chimeric Antigen Receptor
MALPVTALLLPLALLLHAARPGSGSGAQAAEVQLVESGGGLVQPGRSLRLSCAASGFTFNDYAMHWVRQAPGKGLEWVSTISWNSGSIGYADSVKGRFTISRDNAKKSLYLQMNSLRAEDTALYYCAKDIQYGNYYYGMDVWGQGTTVTVSSGGGGSGGGGSGGGGSEIVLTQSPATLSLSPGERATLSCRASQSVSSYLAWYQQKPGQAPRLLIYDASNRATGIPARFSGSGSGTDFTLTISSLEPEDFAVYYCQQRSNWPITFGQGTRLEIKRSDPASGAGSGSGSAVHKESGNGHNIWVILVVTLVVPLLLVAVLIVCCCIGSGCGGDPKCMDRVCFWRLGLLRGPGAEDNAHNEILSNADSLSTFVSEQQMESQEPADLTGVTVQSPGEAQCLLGPAEAEGSQRRRLLVPANGADPTETLMLFFDKFANIVPFDSWDQLMRQLDLTKNEIDVVRAGTAGPGDALYAMLMKWVNKTGRNASIHTLLDALERMEERHAKEKIQDLLVDSGKFIYLEDGTGSAVSLESHG

SEQ ID NO: 206754 - protein, 538 aa, Artificial Sequence
  Description of Artificial Sequence: Synthetic Chimeric Antigen Receptor
MALPVTALLLPLALLLHAARPGSGSGAQAAEVQLVESGGGLVQPGRSLRLSCAASGFTFNDYAMHWVRQAPGKGLEWVSTISWNSGSIGYADSVKGRFTISRDNAKKSLYLQMNSLRAEDTALYYCAKDIQYGNYYYGMDVWGQGTTVTVSSGGGGSGGGGSGGGGSEIVLTQSPATLSLSPGERATLSCRASQSVSSYLAWYQQKPGQAPRLLIYDASNRATGIPARFSGSGSGTDFTLTISSLEPEDFAVYYCQQRSNWPITFGQGTRLEIKRSDPASGAGSGSGSAVHYPPQLLGPSCSWEAEGLHCSCSSQASPAPSLRWWLGEELLEGNSSQGSFEVTPSSAGPWANSSLSLHGGLSSGLRLRCKAWNVHGAQSGSVFQLLPGKLEHGGGLGLGAALGAGVAALLAFCSCLVVFRVKICRKEARKRAAAEQDVPSTLGPISQGHQHECSAGSSQDHPPPGAATYTPGKGEEQELHYASLSFQGLRLWEPADQEAPSTTEYSEIKIHTGQPLRGPGFGLQLEREMSGMVPKSHG

SEQ ID NO: 206755 - protein, 548 aa, Artificial Sequence
  Description of Artificial Sequence: Synthetic Chimeric Antigen Receptor
MALPVTALLLPLALLLHAARPGSGSGAQAAEVQLVESGGGLVQPGRSLRLSCAASGFTFNDYAMHWVRQAPGKGLEWVSTISWNSGSIGYADSVKGRFTISRDNAKKSLYLQMNSLRAEDTALYYCAKDIQYGNYYYGMDVWGQGTTVTVSSGGGGSGGGGSGGGGSEIVLTQSPATLSLSPGERATLSCRASQSVSSYLAWYQQKPGQAPRLLIYDASNRATGIPARFSGSGSGTDFTLTISSLEPEDFAVYYCQQRSNWPITFGQGTRLEIKRSDPASGAGSGSGSAVHYSPKLLGPSCSWEAEGLHCSCSSQASPAPSLRWWLGEELLEGNSSQDSFEVTPSSAGPWANSSLSLHGGLSSGLRLRCEAWNVHGAQSGSILQLPDKKGLISTAFSNGAFLGIGITALLFLCLALIIMKILPKRRTQTETPRPRFSRHSTILDYINVVPTAGPLAQKRNQKATPNSPRTPLPPGAPSPESKKNQKKQYQLPSFPEPKSSTQAPESQESQEELHYATLNFPGVRPRPEARMPKGTQADYAEVKFQSHG

SEQ ID NO: 206756 - protein, 554 aa, Artificial Sequence
  Description of Artificial Sequence: Synthetic Chimeric Antigen Receptor
MALPVTALLLPLALLLHAARPGSGSGAQAAEVQLVESGGGLVQPGRSLRLSCAASGFTFNDYAMHWVRQAPGKGLEWVSTISWNSGSIGYADSVKGRFTISRDNAKKSLYLQMNSLRAEDTALYYCAKDIQYGNYYYGMDVWGQGTTVTVSSGGGGSGGGGSGGGGSEIVLTQSPATLSLSPGERATLSCRASQSVSSYLAWYQQKPGQAPRLLIYDASNRATGIPARFSGSGSGTDFTLTISSLEPEDFAVYYCQQRSNWPITFGQGTRLEIKRSDPASGAGSGSGSAVHKESGTKHSGEAPAVEETVTSSPGTPASPCSLSGIIIGVTVAAVVLIVAVFVCKSLLWKKVLPYLKGICSGGGGDPERVDRSSQRPGAEDNVLNEIVSILQPTQVPEQEMEVQEPAEPTGVNMLSPGESEHLLEPAEAERSQRRRLLVPANEGDPTETLRQCFDDFADLVPFDSWEPLMRKLGLMDNEIKVAKAEAAGHRDTLYTMLIKWVNKTGRDASVHTLLDALETLGERLAKQKIEDHLLSSGKFMYLEGNADSAMSSHG

SEQ ID NO: 206757 - protein, 284 aa, Artificial Sequence
  Description of Artificial Sequence: Synthetic Chimeric Antigen Receptor
MALPVTALLLPLALLLHAARPEVQLQQSGPGLVKPSQTLSLTCAISGDSVLSNSDTWNWIRQSPSRGLEWLGRTYHRSTWYDDYASSVRGRVSINVDTSKNQYSLQLNAVTPEDTGAYYCARDRLQDGNSWSDAFDVWGQGTMVTVSSGGGGSGGGGSGGGGSQSALTQPASVSGSPGQSITISCTGTSSDVGGYNYVSWYQQHPGKAPKLMIYDVSNRPSGVSNRFSGSKSGNTASLTISGLQAEDEADYYCSSYTSSSTPYVFGTGTQLTVLGSHHHHHHHH

SEQ ID NO: 206758 - protein, 485 aa, Artificial Sequence
  Description of Artificial Sequence: Synthetic Chimeric Antigen Receptor
MALPVTALLLPLALLLHAARPEVQLVESGGGLVKPGGSLRLSCVASGFTFSNAWMNWVRQAPGKGLEWVGRIKSKTDGGTADYAAPVKGRFTISRDDSKNTMYLQMNSLKTEDTGVYYCITGATDVWGQGTTVTVSSGGGGSGGGGSGGGGSSYVLTQPPSASGTPGQRVTISCSGSSSNIGSNYVYWYQQLPGTAPKLLIYRNNQRPSGVPDRFSGSKSGTSASLAISGLRSEDEADYYCAAWDDSLSGPVFGGGTKLTVLTTTPAPRPPTPAPTIASQPLSLRPEACRPAAGGAVHTRGLDFACDIYIWAPLAGTCGVLLLSLVITLYCKRGRKKLLYIFKQPFMRPVQTTQEEDGCSCRFPEEEEGGCELRVKFSRSADAPAYKQGQNQLYNELNLGRREEYDVLDKRRGRDPEMGGKPRRKNPQEGLYNELQKDKMAEAYSEIGMKGERRRGKGHDGLYQGLSTATKDTYDALHMQALPPR

SEQ ID NO: 206759 - protein, 485 aa, Artificial Sequence
  Description of Artificial Sequence: Synthetic Chimeric Antigen Receptor
MALPVTALLLPLALLLHAARPQVQLVQSGAEVKKPGASVKVSCKASGYTFTSYYMHWVRQAPGQGLEWMGIINPSGGSTSYAQKFQGRVTMTRDTSTSTVYMELSSLRSEDTAVYYCARGDYYMDVWGKGTTVTVSSGGGGSGGGGSGGGGSQSALTQPASASGSPGQSVTISCTGTSSDVGGYNYVSWYQQHPGKAPKLMIYEVSKRPSGVPDRFSGSKSGNTASLTISGLQAEDEADYYCSSYTSSGTLVFGGGTKLTVLTTTPAPRPPTPAPTIASQPLSLRPEACRPAAGGAVHTRGLDFACDIYIWAPLAGTCGVLLLSLVITLYCKRGRKKLLYIFKQPFMRPVQTTQEEDGCSCRFPEEEEGGCELRVKFSRSADAPAYKQGQNQLYNELNLGRREEYDVLDKRRGRDPEMGGKPRRKNPQEGLYNELQKDKMAEAYSEIGMKGERRRGKGHDGLYQGLSTATKDTYDALHMQALPPR

SEQ ID NO: 206760 - protein, 486 aa, Artificial Sequence
  Description of Artificial Sequence: Synthetic Chimeric Antigen Receptor
MALPVTALLLPLALLLHAARPQVQLVQSGAEVKKPGASVKVSCKASGYTFTSYYMHWVRQAPGQGLEWMGIINPSGGSTSYAQKFQGRVTMTRDTSTSTVYMELSSLRSEDTAVYYCARDLDVSLDIWGQGTMVTVSSGGGGSGGGGSGGGGSQSALTQPASVSGSPGQSITISCSGTSSDVGGYNSVSWYQQYPGKAPKLMIYDVNNRPSGVSSRFSGSKSGNTASLTISGLQAEDEADYYCSSYTSSSTLFFGAGTKVTVLTTTPAPRPPTPAPTIASQPLSLRPEACRPAAGGAVHTRGLDFACDIYIWAPLAGTCGVLLLSLVITLYCKRGRKKLLYIFKQPFMRPVQTTQEEDGCSCRFPEEEEGGCELRVKFSRSADAPAYKQGQNQLYNELNLGRREEYDVLDKRRGRDPEMGGKPRRKNPQEGLYNELQKDKMAEAYSEIGMKGERRRGKGHDGLYQGLSTATKDTYDALHMQALPPR

SEQ ID NO: 206761 - protein, 487 aa, Artificial Sequence
  Description of Artificial Sequence: Synthetic Chimeric Antigen Receptor
MALPVTALLLPLALLLHAARPEVQLVESGAEVKKPGASVKVSCKASGYTFTSYYMHWVRQAPGQGLEWMGIINPSGGSTSYAQKFQGRVTMTRDTSTSTAYMELSSLRSEDTAVYYCAREAGVVAVDYWGQGTLVTVSSGGGGSGGGGSGGGGSQSALTQPASVSGSPGQSITISCTGTSSDVGGYNYVSWYQQHPGKAPKLMIYDVSNRPSGVSNRFSGSKSGNTASLTISGLQAEDEADYYCSSYTSSSTWVFGGGTKLTVLTTTPAPRPPTPAPTIASQPLSLRPEACRPAAGGAVHTRGLDFACDIYIWAPLAGTCGVLLLSLVITLYCKRGRKKLLYIFKQPFMRPVQTTQEEDGCSCRFPEEEEGGCELRVKFSRSADAPAYKQGQNQLYNELNLGRREEYDVLDKRRGRDPEMGGKPRRKNPQEGLYNELQKDKMAEAYSEIGMKGERRRGKGHDGLYQGLSTATKDTYDALHMQALPPR

SEQ ID NO: 206762 - protein, 488 aa, Artificial Sequence
  Description of Artificial Sequence: Synthetic Chimeric Antigen Receptor
MALPVTALLLPLALLLHAARPEVQLVESGAEVKKPGSSVKVSCKASGGTFSSYAISWVRQAPGQGLEWMGGIIPIFGTANYAQKFQGRVTITADESTSTAYMELSSLRSEDTAVYYCARDHKVVRFGYWGQGTLVTVSSGGGGSGGGGSGGGGSHVILTQPPSASASLGASVKLTCTLSSGHSSYAIAWHQQQPEKGPRYLMKVNSDGSLSKGDGIPDRFSGSTSGAERYLTISSLQSEDEADYYCQTWGSGMAIFGGGTKLTVLTTTPAPRPPTPAPTIASQPLSLRPEACRPAAGGAVHTRGLDFACDIYIWAPLAGTCGVLLLSLVITLYCKRGRKKLLYIFKQPFMRPVQTTQEEDGCSCRFPEEEEGGCELRVKFSRSADAPAYKQGQNQLYNELNLGRREEYDVLDKRRGRDPEMGGKPRRKNPQEGLYNELQKDKMAEAYSEIGMKGERRRGKGHDGLYQGLSTATKDTYDALHMQALPPR

SEQ ID NO: 206763 - protein, 488 aa, Artificial Sequence
  Description of Artificial Sequence: Synthetic Chimeric Antigen Receptor
MALPVTALLLPLALLLHAARPQVQLVQSGAEVKKPGASVKVSCKASGYTFTSYYMHWVRQAPGQGLEWMGIINPSGGSTSYAQKFQGRVTMTRDTSISTAYMELSRLRSDDTAVYYCAREMDDSSGPDYWGQGTLVTVSSGGGGSGGGGSGGGGSQSALTQPASVSGSPGQSITISCTGTSSDVGGYNYVSWYQQHPGKAPKLMIYEVSNRPSGVSNRFSGSKSGNTASLTISGLQAEDEADYYCSSYTSSSTLVFGTGTKLTVLTTTPAPRPPTPAPTIASQPLSLRPEACRPAAGGAVHTRGLDFACDIYIWAPLAGTCGVLLLSLVITLYCKRGRKKLLYIFKQPFMRPVQTTQEEDGCSCRFPEEEEGGCELRVKFSRSADAPAYKQGQNQLYNELNLGRREEYDVLDKRRGRDPEMGGKPRRKNPQEGLYNELQKDKMAEAYSEIGMKGERRRGKGHDGLYQGLSTATKDTYDALHMQALPPR

SEQ ID NO: 206764 - protein, 489 aa, Artificial Sequence
  Description of Artificial Sequence: Synthetic Chimeric Antigen Receptor
MALPVTALLLPLALLLHAARPEVQLVESGGGLVQPGRSLRLSCAASGFTFDDYAMHWVRQAPGKGLEWVSGISWNSGSIGYADSVKGRFTISRDNAKNSLYLQMNSLRAEDTALYYCAKDKGGGYYDFWSGSDYWGQGTLVTVSSGGGGSGGGGSGGGGSSSELTQDPAVSVALGQTVRITCQGDSLRSYYASWYQQKPGQAPVLVIYGKNNRPSGIPDRFSGSSSGNTASLTITGAQAEDEADYYCNSRDSSGWVFGGGTKLTVLTTTPAPRPPTPAPTIASQPLSLRPEACRPAAGGAVHTRGLDFACDIYIWAPLAGTCGVLLLSLVITLYCKRGRKKLLYIFKQPFMRPVQTTQEEDGCSCRFPEEEEGGCELRVKFSRSADAPAYKQGQNQLYNELNLGRREEYDVLDKRRGRDPEMGGKPRRKNPQEGLYNELQKDKMAEAYSEIGMKGERRRGKGHDGLYQGLSTATKDTYDALHMQALPPR

SEQ ID NO: 206765 - protein, 489 aa, Artificial Sequence
  Description of Artificial Sequence: Synthetic Chimeric Antigen Receptor
MALPVTALLLPLALLLHAARPQVQLQESGPGLVKPSETLSLTCTVSGGSISSSSYYWGWIRQPPGKGLEWIGSIYYSGSTYYNPSLKSRVTISVDTSKNQFSLKLSSVTAADTAVYYCARGRMDTAMAQIWGQGTMVTVSSGDGGSGGGGSGGGGSNFMLTQPHSVSESPGKTVTIPCTGSSGSFASSYVQWYQQRPGSAPATVIYEDNQRPSGVPDRFSGSVDSSSNSASLTISGLKTEDEAVYYCQSYDGATWVFGGGTKLTVLTTTPAPRPPTPAPTIASQPLSLRPEACRPAAGGAVHTRGLDFACDIYIWAPLAGTCGVLLLSLVITLYCKRGRKKLLYIFKQPFMRPVQTTQEEDGCSCRFPEEEEGGCELRVKFSRSADAPAYKQGQNQLYNELNLGRREEYDVLDKRRGRDPEMGGKPRRKNPQEGLYNELQKDKMAEAYSEIGMKGERRRGKGHDGLYQGLSTATKDTYDALHMQALPPR

SEQ ID NO: 206766 - protein, 489 aa, Artificial Sequence
  Description of Artificial Sequence: Synthetic Chimeric Antigen Receptor
MALPVTALLLPLALLLHAARPQVQLVQSGAEVKKPGASVKVSCKASGYTFTSYYMHWVRQAPGQGLEWMGIINPSGGSTSYAQKFQGRVTMTRDTSTSTVYMELSSLRSEDTAVYYCARGSGSLGDAFDIWGQGTMVTVSSGGGGSGGGGSGGGGSQSALTQPASVSGSPGQSITISCTGSSSDVGGYNYVSWYQQHPGKAPKLMIYEVSNRPSGVSNRFSGSKSGNTASLTISGLQAEDEADYYCSSYTSSSTLVFGTGTKVTVLTTTPAPRPPTPAPTIASQPLSLRPEACRPAAGGAVHTRGLDFACDIYIWAPLAGTCGVLLLSLVITLYCKRGRKKLLYIFKQPFMRPVQTTQEEDGCSCRFPEEEEGGCELRVKFSRSADAPAYKQGQNQLYNELNLGRREEYDVLDKRRGRDPEMGGKPRRKNPQEGLYNELQKDKMAEAYSEIGMKGERRRGKGHDGLYQGLSTATKDTYDALHMQALPPR

SEQ ID NO: 206767 - protein, 490 aa, Artificial Sequence
  Description of Artificial Sequence: Synthetic Chimeric Antigen Receptor
MALPVTALLLPLALLLHAARPEVQLVESGGGLVQPGRSLRLSCAASGFTFDDYAMHWVRQAPGKGLEWVSGISWNSGSIGYADSVKGRFTISRDNAKNSLYLQMNSLRAEDTALYYCAKGLSSWHFHDALDIWGQGTMVTVSSGGGGSGGGGSGGGGSSSELTQDPAVSVALGQTVRITCQGDSLRSYYASWYQQKPGQAPVLVIYGKNNRPSGIPDRFSGSSSGNTASLTITGAQAEDEADYYCNSRDSSGNHLWVFGGGTKLTVLTTTPAPRPPTPAPTIASQPLSLRPEACRPAAGGAVHTRGLDFACDIYIWAPLAGTCGVLLLSLVITLYCKRGRKKLLYIFKQPFMRPVQTTQEEDGCSCRFPEEEEGGCELRVKFSRSADAPAYKQGQNQLYNELNLGRREEYDVLDKRRGRDPEMGGKPRRKNPQEGLYNELQKDKMAEAYSEIGMKGERRRGKGHDGLYQGLSTATKDTYDALHMQALPPR

SEQ ID NO: 206768 - protein, 490 aa, Artificial Sequence
  Description of Artificial Sequence: Synthetic Chimeric Antigen Receptor
MALPVTALLLPLALLLHAARPQVQLVQSGAEVKKPGASVKVSCKASGYTFTSYGISWVRQAPGQGLEWMGWISAYNGNTNYAQKLQGRVTMTTDTSTSTAYMELRSLRSDDTAVYYCASFSSSDSYDYWGQGTLVTVSSGGGGSGGGGSGGGGSGGGGSEIVLTQSPATLSVSPGERATLSCRASQSVTSNLAWYQQKPGQAPRLLIYAASTRATGIPARFSGSGSGTEFTLTISSMQSEDFAVYFCQQYHTWPPLTFGGGTKVEIKTTTPAPRPPTPAPTIASQPLSLRPEACRPAAGGAVHTRGLDFACDIYIWAPLAGTCGVLLLSLVITLYCKRGRKKLLYIFKQPFMRPVQTTQEEDGCSCRFPEEEEGGCELRVKFSRSADAPAYKQGQNQLYNELNLGRREEYDVLDKRRGRDPEMGGKPRRKNPQEGLYNELQKDKMAEAYSEIGMKGERRRGKGHDGLYQGLSTATKDTYDALHMQALPPR

SEQ ID NO: 206769 - protein, 490 aa, Artificial Sequence
  Description of Artificial Sequence: Synthetic Chimeric Antigen Receptor
MALPVTALLLPLALLLHAARPQVQLVQSGAEVKKPGASVKVSCKASGYTFTSYYMHWVRQAPGQGLEWMGIINPSGGSTSYAQKFQGRVTMTRDTSTSTVYMELSSLRAEDTAVYYCARGGYGDYLDAFDIWGQGTTVTVSSGGGGSGGGGSGSGGSQSALTQPASVSGSPGQSITISCTGTSSDVGGYNYVSWYQQHPGKAPKLMIYEVSNRPSGVSNRFSGSKSGNTASLTISGLQAEDEADYYCSSYTSSSTLVFGTGTQLTVLTTTPAPRPPTPAPTIASQPLSLRPEACRPAAGGAVHTRGLDFACDIYIWAPLAGTCGVLLLSLVITLYCKRGRKKLLYIFKQPFMRPVQTTQEEDGCSCRFPEEEEGGCELRVKFSRSADAPAYKQGQNQLYNELNLGRREEYDVLDKRRGRDPEMGGKPRRKNPQEGLYNELQKDKMAEAYSEIGMKGERRRGKGHDGLYQGLSTATKDTYDALHMQALPPR

SEQ ID NO: 206770 - protein, 490 aa, Artificial Sequence
  Description of Artificial Sequence: Synthetic Chimeric Antigen Receptor
MALPVTALLLPLALLLHAARPQVQLVQSGAEVKKPGASVKVSCKASGYTFTSYYMHWVRQAPGQGLEWMGIINPSGGSTSYAQKFQGRVTMTRDTSTSTVYMELSSLRSEDTAVYYCARDDDFWSGSGAFDIWGQGTTVTVSSGGGGSGGGGSGGGGSSSELTQDPAVSVALGQTVRITCQGDSLRSYYASWYQQKPGQAPVLVIYGKNNRPSGIPDRFSGSSSGNTASLTITGAQAEDEADYYCNSRDSSGNHPVVFGGGTKLTVLTTTPAPRPPTPAPTIASQPLSLRPEACRPAAGGAVHTRGLDFACDIYIWAPLAGTCGVLLLSLVITLYCKRGRKKLLYIFKQPFMRPVQTTQEEDGCSCRFPEEEEGGCELRVKFSRSADAPAYKQGQNQLYNELNLGRREEYDVLDKRRGRDPEMGGKPRRKNPQEGLYNELQKDKMAEAYSEIGMKGERRRGKGHDGLYQGLSTATKDTYDALHMQALPPR

SEQ ID NO: 206771 - protein, 490 aa, Artificial Sequence
  Description of Artificial Sequence: Synthetic Chimeric Antigen Receptor
MALPVTALLLPLALLLHAARPQVQLVQSGAEVKKPGASVKVSCKASGYTFTSYYMHWVRQAPGQGLEWMGIINPSGGSTSYAQKFQGRVTMTRDTSTSTVYMELSSLRSEDTAVYYCARDGFGELSGAFDIWGQGTMVTVSSGGGGSGGGGSGGGGSQSALTQPASVSGSPGQSITISCTGTSSDVGGYNYVSWYQQHPGKAPKLMIYDVSNRPSGVSNRFSGSKSGNTASLTISGLQAEDEADYYCSSYASSSTLVFGGGTKVTVLTTTPAPRPPTPAPTIASQPLSLRPEACRPAAGGAVHTRGLDFACDIYIWAPLAGTCGVLLLSLVITLYCKRGRKKLLYIFKQPFMRPVQTTQEEDGCSCRFPEEEEGGCELRVKFSRSADAPAYKQGQNQLYNELNLGRREEYDVLDKRRGRDPEMGGKPRRKNPQEGLYNELQKDKMAEAYSEIGMKGERRRGKGHDGLYQGLSTATKDTYDALHMQALPPR

SEQ ID NO: 206772 - protein, 490 aa, Artificial Sequence
  Description of Artificial Sequence: Synthetic Chimeric Antigen Receptor
MALPVTALLLPLALLLHAARPQVQLVQSGAEVKKPGASVKVSCKASGYTFTSYYMHWVRQAPGQGLEWMGIINPSGGSTSYAQKFQGRVTMTRDTSTSTVYMELSSLRSEDTAVYYCARGSYGDYGDAFDIWGQGTTVTVSSGGGGSGGGGSGSGGSQSALTQPASVSGSPGQSITISCTGTSSDVGGYKYVSWYQQHPGKAPKLMIYDVSNRPSGVSNRFSGSKSGNTASLTISGLQAEDEADYYCSSYTSSSTLVFGGGTKLTVLTTTPAPRPPTPAPTIASQPLSLRPEACRPAAGGAVHTRGLDFACDIYIWAPLAGTCGVLLLSLVITLYCKRGRKKLLYIFKQPFMRPVQTTQEEDGCSCRFPEEEEGGCELRVKFSRSADAPAYKQGQNQLYNELNLGRREEYDVLDKRRGRDPEMGGKPRRKNPQEGLYNELQKDKMAEAYSEIGMKGERRRGKGHDGLYQGLSTATKDTYDALHMQALPPR

SEQ ID NO: 206773 - protein, 491 aa, Artificial Sequence
  Description of Artificial Sequence: Synthetic Chimeric Antigen Receptor
MALPVTALLLPLALLLHAARPEVQLQQSGPGLVKPSLTLSLTCAISGDSVSSNSATWTWIRQSPSRGLEWLGRTYYRSTWYNDYAVSVKSRITINPDTSKNQFSLQLNSVTPEDTAVYYCAREGSGSYYAYWGQGTLVTVSSGGGGSGGGGSGGGGSQSALTQPASVSGSPGQSITISCTGTSSDVGGYNYVSWYQQHPGKAPKLMIYDVSNRPSGVSNRFSGSKSGNTASLTISGLQAEDEADYYCSSYTSSSTLYVFGTGTKVTVLTTTPAPRPPTPAPTIASQPLSLRPEACRPAAGGAVHTRGLDFACDIYIWAPLAGTCGVLLLSLVITLYCKRGRKKLLYIFKQPFMRPVQTTQEEDGCSCRFPEEEEGGCELRVKFSRSADAPAYKQGQNQLYNELNLGRREEYDVLDKRRGRDPEMGGKPRRKNPQEGLYNELQKDKMAEAYSEIGMKGERRRGKGHDGLYQGLSTATKDTYDALHMQALPPR

SEQ ID NO: 206774 - protein, 491 aa, Artificial Sequence
  Description of Artificial Sequence: Synthetic Chimeric Antigen Receptor
MALPVTALLLPLALLLHAARPEVQLVESGAEVKKPGASVKVSCKASGYTFTSYYMHWVRQAPGQGLEWMGIINPSGGSTSYAQKFQGRVTMTRDTSTSTVYMELSSLRSEDTAVYYCARGPIGCSGGSCLDYWGQGTLVTVSSGGGGSGGGGSGGGGSQSALTQPAYVSGSPGQSITISCTGTNSDVGRYNYVSWYQQHPGKAPKLMIYEVSYRPSGVSNRFSGSKSGNTASLTISGLQAEDEADYYCSSYTTSSTLDFGTGTKVTVLTTTPAPRPPTPAPTIASQPLSLRPEACRPAAGGAVHTRGLDFACDIYIWAPLAGTCGVLLLSLVITLYCKRGRKKLLYIFKQPFMRPVQTTQEEDGCSCRFPEEEEGGCELRVKFSRSADAPAYKQGQNQLYNELNLGRREEYDVLDKRRGRDPEMGGKPRRKNPQEGLYNELQKDKMAEAYSEIGMKGERRRGKGHDGLYQGLSTATKDTYDALHMQALPPR

SEQ ID NO: 206775 - protein, 491 aa, Artificial Sequence
  Description of Artificial Sequence: Synthetic Chimeric Antigen Receptor
MALPVTALLLPLALLLHAARPEVQLVESGGGLVKPGGSLRLSCAASGFTFSDYYMSWIRQAPGKGLEWVSYISSSGSTIYYADSVKGRFTISRDNAKNSLYLQMNSLRAEDTAVYYCARDDFWSGSVDYWGQGTLVTVSSGGGGSGGGGSGGGGSGGGGSSYVLTQPPSVSVAPGKTATITCGGTNIGSKNVHWYQQKPGQAPVLAIYYDSDRPSGIPERFSGSNSGNTATLTISRVEAGDEADYFCQVWDSSSDHWVFGGGTKLTVLTTTPAPRPPTPAPTIASQPLSLRPEACRPAAGGAVHTRGLDFACDIYIWAPLAGTCGVLLLSLVITLYCKRGRKKLLYIFKQPFMRPVQTTQEEDGCSCRFPEEEEGGCELRVKFSRSADAPAYKQGQNQLYNELNLGRREEYDVLDKRRGRDPEMGGKPRRKNPQEGLYNELQKDKMAEAYSEIGMKGERRRGKGHDGLYQGLSTATKDTYDALHMQALPPR

SEQ ID NO: 206776 - protein, 491 aa, Artificial Sequence
  Description of Artificial Sequence: Synthetic Chimeric Antigen Receptor
MALPVTALLLPLALLLHAARPEVQLVESGGGLVQPGGSLRLSCAASGFTFSSYAMHWVRQAPGKGLEYVSAISSNGGSTYYANSVKDRFTISRDNSKNTLYLQMGSLRAEDMAVYYCARVHSSGYYHPGPNDYWGQGTLVTVSSGGGGSGGGGSGGGGSSSELTQDPAVSVALGQTVRITCQGDSLRTYYATWYQQKPGQAPVLVFYDENNRPSGIPDRFSGSSSGNTASLTITGTQAEDEADYYCSSRDSSGNPSCVFGGGTKLTVLTTTPAPRPPTPAPTIASQPLSLRPEACRPAAGGAVHTRGLDFACDIYIWAPLAGTCGVLLLSLVITLYCKRGRKKLLYIFKQPFMRPVQTTQEEDGCSCRFPEEEEGGCELRVKFSRSADAPAYKQGQNQLYNELNLGRREEYDVLDKRRGRDPEMGGKPRRKNPQEGLYNELQKDKMAEAYSEIGMKGERRRGKGHDGLYQGLSTATKDTYDALHMQALPPR

SEQ ID NO: 206777 - protein, 491 aa, Artificial Sequence
  Description of Artificial Sequence: Synthetic Chimeric Antigen Receptor
MALPVTALLLPLALLLHAARPEVQLVESGGGLVQPGGSLRLSCAASGFTFSSYAMSWVRQAPGKGLEWVSYISSSSSTIYYADSVKGRFTISRDNAKNSLYLQMNSLRAEDTAVYYCARDGPIRYFDHSKAFDIWGQGTMVTVSSGGGGSGGGGSGGGGSSSELTQDPAVSVALGQTVRITCQGDSLRSYYASWYQQKPGQAPVLVIYGKNNRPSGIPDRFSGSSSGNTASLTITGAQAEDEADYYRNSRDSSGNPYVFGTGTKVTVLTTTPAPRPPTPAPTIASQPLSLRPEACRPAAGGAVHTRGLDFACDIYIWAPLAGTCGVLLLSLVITLYCKRGRKKLLYIFKQPFMRPVQTTQEEDGCSCRFPEEEEGGCELRVKFSRSADAPAYKQGQNQLYNELNLGRREEYDVLDKRRGRDPEMGGKPRRKNPQEGLYNELQKDKMAEAYSEIGMKGERRRGKGHDGLYQGLSTATKDTYDALHMQALPPR

SEQ ID NO: 206778 - protein, 491 aa, Artificial Sequence
  Description of Artificial Sequence: Synthetic Chimeric Antigen Receptor
MALPVTALLLPLALLLHAARPQVQLVQSGAEVKKPGASVKVSCKASGYTFTGYYMHWVRQAPGQGLEWMGWINPNSGGTNYAQKFQGRVTMTRDTSISTAYMELSRLRSDDTAVYYCARDYWGYYGSGTLDYWGQGTLVTVSSGGGGSGGGGSGGGGSQSALTQPGSVSGSPGQSITISCTGTSSDVGGYNYVSWYQQHPGKAPKLIIYDVSSRPSGVSNRFSGSQSGNTASLTISGLQAEDEADYSCSSYAGSNTLVFGTGTKVTVLTTTPAPRPPTPAPTIASQPLSLRPEACRPAAGGAVHTRGLDFACDIYIWAPLAGTCGVLLLSLVITLYCKRGRKKLLYIFKQPFMRPVQTTQEEDGCSCRFPEEEEGGCELRVKFSRSADAPAYKQGQNQLYNELNLGRREEYDVLDKRRGRDPEMGGKPRRKNPQEGLYNELQKDKMAEAYSEIGMKGERRRGKGHDGLYQGLSTATKDTYDALHMQALPPR

SEQ ID NO: 206779 - protein, 491 aa, Artificial Sequence
  Description of Artificial Sequence: Synthetic Chimeric Antigen Receptor
MALPVTALLLPLALLLHAARPQVQLVQSGAEVKKPGASVKVSCKASGYTFTSYYMHWVRQAPGQGLEWMGIINPSGGSTSYAQKFQGRVTMTRDTSTSTVYMELSSLRSEDTAVYYCARDLAAAGNYYYYGMDVWGQGTTVTVSSGGGGSGGGGSGGGGSSSELTQDPAVSVALGQTARITCQGDSLRSYFTSWYHQKPGQAPVLVIYGNNNRPSGIPDRFSGSSSGNTASLTITGAQAEDEGDYYCDSRDSSGDHLVFGGGTKLTVLTTTPAPRPPTPAPTIASQPLSLRPEACRPAAGGAVHTRGLDFACDIYIWAPLAGTCGVLLLSLVITLYCKRGRKKLLYIFKQPFMRPVQTTQEEDGCSCRFPEEEEGGCELRVKFSRSADAPAYKQGQNQLYNELNLGRREEYDVLDKRRGRDPEMGGKPRRKNPQEGLYNELQKDKMAEAYSEIGMKGERRRGKGHDGLYQGLSTATKDTYDALHMQALPPR

SEQ ID NO: 206780 - protein, 492 aa, Artificial Sequence
  Description of Artificial Sequence: Synthetic Chimeric Antigen Receptor
MALPVTALLLPLALLLHAARPQVQLQESGPGLVKPSGTLSLTCAVSGASITSRHWWNWVRHSPGKGLEWIGQIYHSGTTTYNPSLGSRVTISVDKSKNQISLELRSVTAADTATYYCVRDYLELATYYGMDVWGQGTTVTVSSGGGGSGGGGSGGGGSEIVLTQSPLSLPVTPGEPASISCRSSQSLLYSDGYNYLDWYLQKPGQSPQLLIYLGSNRASGVPDRFSGSGSGTDFTLQISGVETEDVGVYYCMQALQTQSFGQGTKLEIKTTTPAPRPPTPAPTIASQPLSLRPEACRPAAGGAVHTRGLDFACDIYIWAPLAGTCGVLLLSLVITLYCKRGRKKLLYIFKQPFMRPVQTTQEEDGCSCRFPEEEEGGCELRVKFSRSADAPAYKQGQNQLYNELNLGRREEYDVLDKRRGRDPEMGGKPRRKNPQEGLYNELQKDKMAEAYSEIGMKGERRRGKGHDGLYQGLSTATKDTYDALHMQALPPR

SEQ ID NO: 206781 - protein, 492 aa, Artificial Sequence
  Description of Artificial Sequence: Synthetic Chimeric Antigen Receptor
MALPVTALLLPLALLLHAARPQVQLVQSGAEVKKPGASVKVSCKASGYTFTSYYMHWVRQAPGQGLEWMGIINPSGGSTSYAQKFQGRVTMTRDTSTSTVYMELSSLRSEDTAVYYCARPEGVSYYDSSVLDYWGQGTLVTVSSGGGGSGGGGSGGGGSQSALTQPASVSGSPGQSITISCTGTSSDVGGYKHVSWYQHHPGKAPKLMIYDVSNRPSGVSNRFSGSKSGNTASLTVSGLQAEDEAHYYCVSYRNFNSLVFGTGTKVTVLTTTPAPRPPTPAPTIASQPLSLRPEACRPAAGGAVHTRGLDFACDIYIWAPLAGTCGVLLLSLVITLYCKRGRKKLLYIFKQPFMRPVQTTQEEDGCSCRFPEEEEGGCELRVKFSRSADAPAYKQGQNQLYNELNLGRREEYDVLDKRRGRDPEMGGKPRRKNPQEGLYNELQKDKMAEAYSEIGMKGERRRGKGHDGLYQGLSTATKDTYDALHMQALPPR

SEQ ID NO: 206782 - protein, 493 aa, Artificial Sequence
  Description of Artificial Sequence: Synthetic Chimeric Antigen Receptor
MALPVTALLLPLALLLHAARPEVQLQQSGPGLVKPSQTLSLTCAISGDSVSSNSAAWNWIRQSPSRGLEWLGRTYYRSKWYNDYAVSVKSRITINPDTSKNQFSLQLNSVTPEDTAVYYCAREESSSGWYEGNWFDPWGQGTLVTVSSGGGGSGGGGSGGGGSSSELTQDPAVSVALGQTVRITCQGDSLRSYYASWYQQKPGQAPVLVIYGKNHRPSGIPDRFSGSSSGDTDSLTITGAQAEDEADYYCHSRDSSGNHLFGGGTKLTVLTTTPAPRPPTPAPTIASQPLSLRPEACRPAAGGAVHTRGLDFACDIYIWAPLAGTCGVLLLSLVITLYCKRGRKKLLYIFKQPFMRPVQTTQEEDGCSCRFPEEEEGGCELRVKFSRSADAPAYKQGQNQLYNELNLGRREEYDVLDKRRGRDPEMGGKPRRKNPQEGLYNELQKDKMAEAYSEIGMKGERRRGKGHDGLYQGLSTATKDTYDALHMQALPPR

SEQ ID NO: 206783 - protein, 494 aa, Artificial Sequence
  Description of Artificial Sequence: Synthetic Chimeric Antigen Receptor
MALPVTALLLPLALLLHAARPQVQLQESGPGLVKPSETLSLTCSVSGGSINSYYWSWIRQAPGKGLEWIAFTSHSGNVKYNPSLTGRVTIAVDTSKNQFYLEVTSVTAADTAVYFCARGLDPLFAYDAFEIWGLGTMVTVSSGGGGSGGGGSGGGGSEIVLTQSPLSLPVTPGEPASISCRSSQSLLHSNGYNYLDWYLQKPGQSPQLLIYLGSNRASGVPDRFSGSGSGTDFTLKISRVEAEDVGVYYCMQVLQTPPLTFGGGTKVDIKRTTTPAPRPPTPAPTIASQPLSLRPEACRPAAGGAVHTRGLDFACDIYIWAPLAGTCGVLLLSLVITLYCKRGRKKLLYIFKQPFMRPVQTTQEEDGCSCRFPEEEEGGCELRVKFSRSADAPAYKQGQNQLYNELNLGRREEYDVLDKRRGRDPEMGGKPRRKNPQEGLYNELQKDKMAEAYSEIGMKGERRRGKGHDGLYQGLSTATKDTYDALHMQALPPR

SEQ ID NO: 206784 - protein, 494 aa, Artificial Sequence
  Description of Artificial Sequence: Synthetic Chimeric Antigen Receptor
MALPVTALLLPLALLLHAARPQVQLVQSGAEVKKPGASVKVSCKASGYTFTSYYMHWVRQAPGQGLEWMGIINPSGGSTSYAQKFQGRVTMTRDTSTSTVYMELSSLRSEDTAVYYCAREDDSSGYTSPFDYWGQGTLVTVSSGGGGSGGGGSGGGGSGGGRSSYELTQPPSVSVAPGETASIACGGHNIRSKNVHWYQQKPGQAPVLVISYDGDRPSGIPERFSGSNLGSTATLTISRVEAGDEADYYCQVWDSDSDHYVFGTGTKVTVLTTTPAPRPPTPAPTIASQPLSLRPEACRPAAGGAVHTRGLDFACDIYIWAPLAGTCGVLLLSLVITLYCKRGRKKLLYIFKQPFMRPVQTTQEEDGCSCRFPEEEEGGCELRVKFSRSADAPAYKQGQNQLYNELNLGRREEYDVLDKRRGRDPEMGGKPRRKNPQEGLYNELQKDKMAEAYSEIGMKGERRRGKGHDGLYQGLSTATKDTYDALHMQALPPR

SEQ ID NO: 206785 - protein, 494 aa, Artificial Sequence
  Description of Artificial Sequence: Synthetic Chimeric Antigen Receptor
MALPVTALLLPLALLLHAARPQVQLVQSGGGVVQPGRSLRLSCAASGFTFSSYAMSWVRQAPGKGLEWVSAISGSGGSTYYADSVKGRFTISRDNSKNTLYLQMNSLRAEDTAVYYCAKEPLFGVVEEDVDYWGQGTLVTVSSGGGGSGGGGSGGGGSDVVMTQSPLSLPVTPGEPASISCRSSQSLLAGNGHNYLDWYLQKPGQSPQLLIYLGSNRASGVPDRFSGSGSGTDFTLKISRVEAEDVGVYYCMQALQNPLTFGGGTKLEIKRTTTPAPRPPTPAPTIASQPLSLRPEACRPAAGGAVHTRGLDFACDIYIWAPLAGTCGVLLLSLVITLYCKRGRKKLLYIFKQPFMRPVQTTQEEDGCSCRFPEEEEGGCELRVKFSRSADAPAYKQGQNQLYNELNLGRREEYDVLDKRRGRDPEMGGKPRRKNPQEGLYNELQKDKMAEAYSEIGMKGERRRGKGHDGLYQGLSTATKDTYDALHMQALPPR

SEQ ID NO: 206786 - protein, 495 aa, Artificial Sequence
  Description of Artificial Sequence: Synthetic Chimeric Antigen Receptor
MALPVTALLLPLALLLHAARPEVQLQQSGPGLVKPSQTLSLTCAISGDSVSSNSAAWNWIRQSPSRGLEWLGRTYYRSKWYNDYAVSVKSRITINPDTSKNQFSLQLNSVTPEDTAVYYCARDLGWIAVAGTFDYWGQGTLVTVSSGGGGSGGGGSGGGGSQSALTQPASVSGSPGQSITISCTGTSSDVGGYNYVSWYQQHPGKAPKLMIYDVSKRPSGVSNRFSGSKSGNTASLTISGLQAEDEADYYCSSYTSSSLNHVFGTGTKVTVLTTTPAPRPPTPAPTIASQPLSLRPEACRPAAGGAVHTRGLDFACDIYIWAPLAGTCGVLLLSLVITLYCKRGRKKLLYIFKQPFMRPVQTTQEEDGCSCRFPEEEEGGCELRVKFSRSADAPAYKQGQNQLYNELNLGRREEYDVLDKRRGRDPEMGGKPRRKNPQEGLYNELQKDKMAEAYSEIGMKGERRRGKGHDGLYQGLSTATKDTYDALHMQALPPR

SEQ ID NO: 206787 - protein, 495 aa, Artificial Sequence
  Description of Artificial Sequence: Synthetic Chimeric Antigen Receptor
MALPVTALLLPLALLLHAARPQVQLVQSGGGLIQPGGSLRLSCAASGFTVSSNYMSWVRQAPGKGLEWVSVIYSGGSTYYADSVKGRFTISRDNSKNTLYLQMNSLRAEDTAVYYCASQSTPYDSSGYYSGDAFDIWGQGTMVTVSSGGGGSGGGGSGGGGSSYVLTQPPSASGTPGQRVTISCSGSSSNIGSNYVYWYQQLPGTAPKLLIYRNNQRPSGVPDRFSGSKSGTSASLAISGLRSEDEADYYCAAWDDSLSGYVFGTGTKLTVLTTTPAPRPPTPAPTIASQPLSLRPEACRPAAGGAVHTRGLDFACDIYIWAPLAGTCGVLLLSLVITLYCKRGRKKLLYIFKQPFMRPVQTTQEEDGCSCRFPEEEEGGCELRVKFSRSADAPAYKQGQNQLYNELNLGRREEYDVLDKRRGRDPEMGGKPRRKNPQEGLYNELQKDKMAEAYSEIGMKGERRRGKGHDGLYQGLSTATKDTYDALHMQALPPR

SEQ ID NO: 206788 - protein, 496 aa, Artificial Sequence
  Description of Artificial Sequence: Synthetic Chimeric Antigen Receptor
MALPVTALLLPLALLLHAARPEVQLVESGAEVKKPGESLKISCKGSGYSFTGSWIGWGRQMPGKGLEWMGIIYPGDSDTRYSPSFQGQVTISADKSISTAYLQWSSLKASDTAMYYCARGFLRGGDCCGALDIWGQGTMVTVSSGGGGSGGGGSGGGGSDIVMTQSPLSLPVTPGEPASISCRSSQSLLHSNGYNYLDWYLQKPGQSPQLLIYLGSNRASGVPDRFSGSGSGTDFTLKISRVEAEDVGVYYCMQALQTPPWTFGQGTKLEIKRTTTPAPRPPTPAPTIASQPLSLRPEACRPAAGGAVHTRGLDFACDIYIWAPLAGTCGVLLLSLVITLYCKRGRKKLLYIFKQPFMRPVQTTQEEDGCSCRFPEEEEGGCELRVKFSRSADAPAYKQGQNQLYNELNLGRREEYDVLDKRRGRDPEMGGKPRRKNPQEGLYNELQKDKMAEAYSEIGMKGERRRGKGHDGLYQGLSTATKDTYDALHMQALPPR

SEQ ID NO: 206789 - protein, 496 aa, Artificial Sequence
  Description of Artificial Sequence: Synthetic Chimeric Antigen Receptor
MALPVTALLLPLALLLHAARPQVQLVQSGAEVKKPGASVKVSCKASGYTFTSYDINWVRQATGQGLEWMGWMNPNSGNTGYAQKFQGRVTMTRNTSISTAYMELSSLRSEDTAVYYCARGDSNYWSYYGMDVWGQGTLVTVSSGGGGSGGGGSGGGGSGGGGSQSVLTQPRSVSGSPGQSVTISCTGTSSDVGGYNYVSWYQQHPGEAPKLIIYDADKRPSGISNRFSSGKSGNTASLTISGLQVEDEADYYCCSYAGGSTWVFGGGTKVTVLTTTPAPRPPTPAPTIASQPLSLRPEACRPAAGGAVHTRGLDFACDIYIWAPLAGTCGVLLLSLVITLYCKRGRKKLLYIFKQPFMRPVQTTQEEDGCSCRFPEEEEGGCELRVKFSRSADAPAYKQGQNQLYNELNLGRREEYDVLDKRRGRDPEMGGKPRRKNPQEGLYNELQKDKMAEAYSEIGMKGERRRGKGHDGLYQGLSTATKDTYDALHMQALPPR

SEQ ID NO: 206790 - protein, 497 aa, Artificial Sequence
  Description of Artificial Sequence: Synthetic Chimeric Antigen Receptor
MALPVTALLLPLALLLHAARPEVQLQQSGPGLVKPSQTLSLTCAISGDSVLSNSDTWNWIRQSPSRGLEWLGRTYHRSTWYDDYASSVRGRVSINVDTSKNQYSLQLNAVTPEDTGVYYCARDRLQDGNSWSDAFDVWGQGTMVTVSSGGGGSGGGGSGGGGSQSALTQPASASGSPGQSVTISCTGTSSDVGGYNYVSWYQQHPGKAPKLMIYDVSNRPSGVSNRFSGSKSGNTASLTISGLQAEDEADYYCSSYTSSSTLYVFGTGTQLTVLTTTPAPRPPTPAPTIASQPLSLRPEACRPAAGGAVHTRGLDFACDIYIWAPLAGTCGVLLLSLVITLYCKRGRKKLLYIFKQPFMRPVQTTQEEDGCSCRFPEEEEGGCELRVKFSRSADAPAYKQGQNQLYNELNLGRREEYDVLDKRRGRDPEMGGKPRRKNPQEGLYNELQKDKMAEAYSEIGMKGERRRGKGHDGLYQGLSTATKDTYDALHMQALPPR

SEQ ID NO: 206791 - protein, 498 aa, Artificial Sequence
  Description of Artificial Sequence: Synthetic Chimeric Antigen Receptor
MALPVTALLLPLALLLHAARPEVQLQQSGPGLVKPSQTLSLTCAISGDSVLSNSDTWNWIRQSPSRGLEWLGRTYHRSTWYDDYASSVRGRVSINVDTSKNQYSLQLNAVTPEDTGVYYCARDRLQDGNSWSDAFDVWGQGTMVTVSSGGGGSGGGGSGGGGSQSALTQPASVSGSPGQSITISCTGTSSDVGGYNYVSWYQQHPGKAPKLMIYDVSNRPSGVSNRFSGSKSGNTASLTISGLQAEDEADYYCSSYTSSSTLVYVFGTGTKVTVLTTTPAPRPPTPAPTIASQPLSLRPEACRPAAGGAVHTRGLDFACDIYIWAPLAGTCGVLLLSLVITLYCKRGRKKLLYIFKQPFMRPVQTTQEEDGCSCRFPEEEEGGCELRVKFSRSADAPAYKQGQNQLYNELNLGRREEYDVLDKRRGRDPEMGGKPRRKNPQEGLYNELQKDKMAEAYSEIGMKGERRRGKGHDGLYQGLSTATKDTYDALHMQALPPR

SEQ ID NO: 206792 - protein, 498 aa, Artificial Sequence
  Description of Artificial Sequence: Synthetic Chimeric Antigen Receptor
MALPVTALLLPLALLLHAARPEVQLQQSGPGLVKPSQTLSLTCAISGDSVSSNSAAWNWIRQSPSRGLEWLGRTYYRSKWYSDYAVSVKSRITINPDTSKNQFSLQLNSVTPEDTAVYYCARDPYDFWSGYPDAFDIWGQGTMVTVSSGGGGSGGGGSGGGGSQSALTQPASVSGSPGQSITISCTGTSSDVGGYNYVSWYQQHPGKAPKVIISEVNNRPSGVSHRFSGSKSGNTASLTISGLQAEDEADYFCSSYTSGRTLYVFGTGSKVTVLGTTTPAPRPPTPAPTIASQPLSLRPEACRPAAGGAVHTRGLDFACDIYIWAPLAGTCGVLLLSLVITLYCKRGRKKLLYIFKQPFMRPVQTTQEEDGCSCRFPEEEEGGCELRVKFSRSADAPAYKQGQNQLYNELNLGRREEYDVLDKRRGRDPEMGGKPRRKNPQEGLYNELQKDKMAEAYSEIGMKGERRRGKGHDGLYQGLSTATKDTYDALHMQALPPR

SEQ ID NO: 206793 - protein, 498 aa, Artificial Sequence
  Description of Artificial Sequence: Synthetic Chimeric Antigen Receptor
MALPVTALLLPLALLLHAARPQVNLRESGPALVKPTQTLTLTCTFSGFSLNTFGMSVSWIRQPPGKALEWLALIDWDDDKYYSTSLRTRLTISKDTAKNQVVLRMTNMDPMDTATYYCARIYGGDRTNTQAPYFFDLWGQGTLVTVSSGGGGSGGGGSGGGGSDVVMTQSPLSLPVTPGEPASISCRSSQSLLHSNGYNYLDWYLQKPGQSPQLLIYLGSNRASGVPDRFSGSGSGTDFTLKISRVEAEDVGVYYCMQALQTPWTFGQGTKLEIKTTTPAPRPPTPAPTIASQPLSLRPEACRPAAGGAVHTRGLDFACDIYIWAPLAGTCGVLLLSLVITLYCKRGRKKLLYIFKQPFMRPVQTTQEEDGCSCRFPEEEEGGCELRVKFSRSADAPAYKQGQNQLYNELNLGRREEYDVLDKRRGRDPEMGGKPRRKNPQEGLYNELQKDKMAEAYSEIGMKGERRRGKGHDGLYQGLSTATKDTYDALHMQALPPR

SEQ ID NO: 206794 - protein, 498 aa, Artificial Sequence
  Description of Artificial Sequence: Synthetic Chimeric Antigen Receptor
MALPVTALLLPLALLLHAARPQVQLVQSGAEVKKPGASVKVSCKASGYTFTSYGISWVRQAPGQGLEWMGWISAYNGNTNYAQKLQGRVTMTTDTSTSTAYMELRSLRSDDTAVYYCARAGLALYSNYVPYYYYGMDVWGQGTTVTVSSGGGGSGGGGSGGGGSNFMLTQPHSVSESPGKTVTISCTRSSGSIASNYVQWYQQRPGSSPTTVIYEDNQRPSGVPDRFSGSIDSSSNSASLTISGLKTEDEADYYCQSYDSSNPWVFGGGTKLTVLTTTPAPRPPTPAPTIASQPLSLRPEACRPAAGGAVHTRGLDFACDIYIWAPLAGTCGVLLLSLVITLYCKRGRKKLLYIFKQPFMRPVQTTQEEDGCSCRFPEEEEGGCELRVKFSRSADAPAYKQGQNQLYNELNLGRREEYDVLDKRRGRDPEMGGKPRRKNPQEGLYNELQKDKMAEAYSEIGMKGERRRGKGHDGLYQGLSTATKDTYDALHMQALPPR

SEQ ID NO: 206795 - protein, 525 aa, Artificial Sequence
  Description of Artificial Sequence: Synthetic Chimeric Antigen Receptor
MALPVTALLLPLALLLHAARPDIQMTQSPSSLSASVGDRVTITCSASSSVSYMNWYQQTPGKAPKRWIYDTSKLASGVPSRFSGSGSGTDYTFTISSLQPEDIATYYCQQWSSNPFTFGQGTKLQIGGGGSGGGGSGGGGSQVQLVQSGGGVVQPGRSLRLSCKASGYTFTRYTMHWVRQAPGKGLEWIGYINPSRGYTNYNQKVKDRFTISRDNSKNTAFLQMDSLRPEDTGVYFCARYYDDHYCLDYWGQGTPVTVSSTTTPAPRPPTPAPTIASQPLSLRPEACRPAAGGAVHTRGLDFACDIYIWAPLAGTCGVLLLSLVITLYCRSKRSRLLHSDYMNMTPRRPGPTRKHYQPYAPPRDFAAYRSKRGRKKLLYIFKQPFMRPVQTTQEEDGCSCRFPEEEEGGCELRVKFSRSADAPAYQQGQNQLYNELNLGRREEYDVLDKRRGRDPEMGGKPQRRKNPQEGLYNELQKDKMAEAYSEIGMKGERRRGKGHDGLYQGLSTATKDTYDALHMQALPPR

SEQ ID NO: 206796 - protein, 711 aa, Artificial Sequence
  Description of Artificial Sequence: Synthetic Chimeric Antigen Receptor
DIQMTQTTSSLSASLGDRVTISCRASQDISKYLNWYQQKPDGTVKLLIYHTSRLHSGVPSRFSGSGSGTDYSLTISNLEQEDIATYFCQQGNTLPYTFGGGTKLEITGGGGSQVQLQQSGPGLVKPSQTLSLTCAISGDSVSSNSAAWNWIRQSPSRGLEWLGRTYYRSKWYNDYAVSVKSRITINPDTSKNQFSLQLNSVTPEDTAVYYCAREVTGDLEDAFDIWGQGTMVTVSSGSTSGSGKPGSGEGSTKGDIQMTQSPSSLSASVGDRVTITCRASQTIWSYLNWYQQRPGKAPNLLIYAASSLQSGVPSRFSGRGSGTDFTLTISSLQAEDFATYYCQQSYSIPQTFGQGTKLEIKGGGGSEVKLQESGPGLVAPSQSLSVTCTVSGVSLPDYGVSWIRQPPRKGLEWLGVIWGSETTYYNSALKSRLTIIKDNSKSQVFLKMNSLQTDDTAIYYCAKHYYYGGSYAMDYWGQGTSVTVSSSGTTTPAPRPPTPAPTIASQPLSLRPEACRPAAGGAVHTRGLDFACDIYIWAPLAGTCGVLLLSLVITLYCKRGRKKLLYIFKQPFMRPVQTTQEEDGCSCRFPEEEEGGCELRVKFSRSADAPAYKQGQNQLYNELNLGRREEYDVLDKRRGRDPEMGGKPRRKNPQEGLYNELQKDKMAEAYSEIGMKGERRRGKGHDGLYQGLSTATKDTYDALHMQALPPR

SEQ ID NO: 206797 - protein, 792 aa, Artificial Sequence [sequence omitted]

SEQ ID NO: 206798 - protein, 727 aa, Artificial Sequence
  Description of Artificial Sequence: Synthetic Chimeric Antigen Receptor
MVLLVTSLLLCELPHPAFLLIPDTEVQLVESGGGLVKPGGSLKLSCAASGFAFSIYDMSWVRQTPEKRLEWVAYISSGGGTYYPDTVKGRFTISRDNAKNTLYLQMSSLKSEDTAMYYCARHSGYGSSYGVLFAYWGQGTLVTVSAGGGGSGGGGSGGGGSDIQMTQTTSSLSASLGDRVTISCRASQDISNYLNWYQQKPDGTVKLLIYYTSILHSGVPSRFSGSGSGTDYSLTISNLEQEDFATYFCQQGNTLPWTFGGGTKLEIKAEPKSCDKTHTCPPCPAPELLGGPSVFLFPPKPKDTLMISRTPEVTCVVVDVSHEDPEVKFNWYVDGVEVHNAKTKPREEQYNSTYRVVSVLTVLHQDWLNGKEYKCKVSNKALPAPIEKTISKAKGQPREPQVYTLPPSRDELTKNQVSLTCLVKGFYPSDIAVEWESNGQPENNYKTTPPVLDSDGSFFLYSKLTVDKSRWQQGNVFSCSVMHEALHNHYTQKSLSLSPGKKDPKAAAIEVMYPPPYLDNEKSNGTIIHVKGKHLCPSPLFPGPSKPFWVLVVVGGVLACYSLLVTVAFIIFWVRSKRSRLLHSDYMNMTPRRPGPTRKHYQPYAPPRDFAAYRSRVKFSRSADAPAYQQGQNQLYNELNLGRREEYDVLDKRRGRDPEMGGKPRRKNPQEGLYNELQKDKMAEAYSEIGMKGERRRGKGHDGLYQGLSTATKDTYDALHMQALPPR

SEQ ID NO: 206799 - protein, 792 aa, Artificial Sequence
  Description of Artificial Sequence: Synthetic Chimeric Antigen Receptor
MVLLVTSLLLCELPHPAFLLIPDTEVQLVESGGGLVKPGGSLKLSCAASGFAFSIYDMSWVRQTPEKRLEWVAYISSGGGTYYPDTVKGRFTISRDNAKNTLYLQMSSLKSEDTAMYYCARHSGYGTHWGVLFAYWGQGTLVTVSAGGGGSGGGGSGGGGSDIQMTQTTSSLSASLGDRVTISCRASQDISNYLNWYQQKPDGTVKLLIYYTSILHSGVPSRFSGSGSGTDYSLTISNLEQEDFATYFCQQGNTLPWTFGGGTKLEIKAEPKSCDKTHTCPPCPAPELLGGPSVFLFPPKPKDTLMISRTPEVTCVVVDVSHEDPEVKFNWYVDGVEVHNAKTKPREEQYNSTYRVVSVLTVLHQDWLNGKEYKCKVSNKALPAPIEKTISKAKGQPREPQVYTLPPSRDELTKNQVSLTCLVKGFYPSDIAVEWESNGQPENNYKTTPPVLDSDGSFFLYSKLTVDKSRWQQGNVFSCSVMHEALHNHYTQKSLSLSPGKKDPKAAAAFVPVFLPAKPTTTPAPRPPTPAPTIASQPLSLRPEACRPAAGGAVHTRGLDFACDIYIWAPLAGTCGVLLLSLVITLYCNHRNRSKRSRLLHSDYMNMTPRRPGPTRKHYQPYAPPRDFAAYRSRFSVVKRGRKKLLYIFKQPFMRPVQTTQEEDGCSCRFPEEEEGGCELRVKFSRSADAPAYQQGQNQLYNELNLGRREEYDVLDKRRGRDPEMGGKPRRKNPQEGLYNELQKDKMAEAYSEIGMKGERRRGKGHDGLYQGLSTATKDTYDALHMQALPPR

SEQ ID NO: 206800 - protein, 511 aa, Artificial Sequence
  Description of Artificial Sequence: Synthetic Chimeric Antigen Receptor
MVLLVTSLLLCELPHPAFLLIPDTEVQLVESGGGLVKPGGSLKLSCAASGFAFSIYDMSWVRQTPEKRLEWVAYISSGGGTYYPDTVKGRFTISRDNAKNTLYLQMSSLKSEDTAMYYCARHSGYGTHWGVLFAYWGQGTLVTVSAGGGGSGGGGSGGGGSDIQMTQTTSSLSASLGDRVTISCRASQDISNYLNWYQQKPDGTVKLLIYYTSILHSGVPSRFSGSGSGTDYSLTISNLEQEDFATYFCQQGNTLPWTFGGGTKLEIKAKTTPPSVYGRVKDPKAAAATTTPAPRPPTPAPTIASQPLSLRPEACRPAAGGAVHTRGLDFACDIYIWAPLAGTCGVLLLSLVITLYCKRGRKKLLYIFKQPFMRPVQTTQEEDGCSCRFPEEEEGGCELRVKFSRSADAPAYKQGQNQLYNELNLGRREEYDVLDKRRGRDPEMGGKPRRKNPQEGLYNELQKDKMAEAYSEIGMKGERRRGKGHDGLYQGLSTATKDTYDALHMQALPPR

SEQ ID NO: 206801 - protein, 571 aa, Artificial Sequence
  Description of Artificial Sequence: Synthetic Chimeric Antigen Receptor
MVLLVTSLLLCELPHPAFLLIPDTEVQLVESGGGLVKPGGSLKLSCAASGFAFSIYDMSWVRQTPEKRLEWVAYISSGGGTYYPDTVKGRFTISRDNAKNTLYLQMSSLKSEDTAMYYCARHSGYGTHWGVLFAYWGQGTLVTVSAGGGGSGGGGSGGGGSDIQMTQTTSSLSASLGDRVTISCRASQDISNYLNWYQQKPDGTVKLLIYYTSILHSGVPSRFSGSGSGTDYSLTISNLEQEDFATYFCQQGNTLPWTFGGGTKLEIKAKTTPPSVYGRVKDPKAAAAFVPVFLPAKPTTTPAPRPPTPAPTIASQPLSLRPEACRPAAGGAVHTRGLDFACDIYIWAPLAGTCGVLLLSLVITLYCNHRNRSKRSRLLHSDYMNMTPRRPGPTRKHYQPYAPPRDFAAYRSRFSVVKRGRKKLLYIFKQPFMRPVQTTQEEDGCSCRFPEEEEGGCELRVKFSRSADAPAYQQGQNQLYNELNLGRREEYDVLDKRRGRDPEMGGKPRRKNPQEGLYNELQKDKMAEAYSEIGMKGERRRGKGHDGLYQGLSTATKDTYDALHMQALPPR

SEQ ID NO: 206802 - protein, 506 aa, Artificial Sequence
  Description of Artificial Sequence: Synthetic Chimeric Antigen Receptor
MVLLVTSLLLCELPHPAFLLIPDTEVQLVESGGGLVKPGGSLKLSCAASGFAFSIYDMSWVRQTPEKRLEWVAYISSGGGTYYPDTVKGRFTISRDNAKNTLYLQMSSLKSEDTAMYYCARHSGYGTHWGVLFAYWGQGTLVTVSAGGGGSGGGGSGGGGSDIQMTQTTSSLSASLGDRVTISCRASQDISNYLNWYQQKPDGTVKLLIYYTSILHSGVPSRFSGSGSGTDYSLTISNLEQEDFATYFCQQGNTLPWTFGGGTKLEIKAKTTPPSVYGRVKDPKAAAIEVMYPPPYLDNEKSNGTIIHVKGKHLCPSPLFPGPSKPFWVLVVVGGVLACYSLLVTVAFIIFWVRSKRSRLLHSDYMNMTPRRPGPTRKHYQPYAPPRDFAAYRSRVKFSRSADAPAYQQGQNQLYNELNLGRREEYDVLDKRRGRDPEMGGKPRRKNPQEGLYNELQKDKMAEAYSEIGMKGERRRGKGHDGLYQGLSTATKDTYDALHMQALPPR

SEQ ID NO: 206803 - protein, 480 aa, Artificial Sequence
  Description of Artificial Sequence: Synthetic Chimeric Antigen Receptor
MLLLVTSLLLCELPHPAFLLIPQVQLQQSGPGLVKPSQTLSLTCAISGDSVSSNSAAWNWIRQSPSRGLEWLGRTYYRSKWYNDYAVSVKSRITINPDTSKNQFSLQLNSVTPEDTAVYYCAREVTGDLEDAFDIWGQGTMVTVSSGGGGSDIQMTQSPSSLSASVGDRVTITCRASQTIWSYLNWYQQRPGKAPNLLIYAASSLQSGVPSRFSGRGSGTDFTLTISSLQAEDFATYYCQQSYSIPQTFGQGTKLEIKAAAIEVMYPPPYLDNEKSNGTIIHVKGKHLCPSPLFPGPSKPFWVLVVVGGVLACYSLLVTVAFIIFWVRSKRSRLLHSDYMNMTPRRPGPTRKHYQPYAPPRDFAAYRSRVKFSRSADAPAYQQGQNQLYNELNLGRREEYDVLDKRRGRDPEMGGKPRRKNPQEGLYNELQKDKMAEAYSEIGMKGERRRGKGHDGLYQGLSTATKDTYDALHMQALPPR

SEQ ID NO: 206804 - protein, 484 aa, Artificial Sequence
  Description of Artificial Sequence: Synthetic Chimeric Antigen Receptor
MLLLVTSLLLCELPHPAFLLIPQVQLQQSGPGLVKPSQTLSLTCAISGDSVSSNSAAWNWIRQSPSRGLEWLGRTYYRSKWYNDYAVSVKSRITINPDTSKNQFSLQLNSVTPEDTAVYYCAREVTGDLEDAFDIWGQGTMVTVSSGGGGSDIQMTQSPSSLSASVGDRVTITCRASQTIWSYLNWYQQRPGKAPNLLIYAASSLQSGVPSRFSGRGSGTDFTLTISSLQAEDFATYYCQQSYSIPQTFGQGTKLEIKAAATTTPAPRPPTPAPTIASQPLSLRPEACRPAAGGAVHTRGLDFACDIYIWAPLAGTCGVLLLSLVITLYCKRGRKKLLYIFKQPFMRPVQTTQEEDGCSCRFPEEEEGGCELRVKFSRSADAPAYKQGQNQLYNELNLGRREEYDVLDKRRGRDPEMGGKPRRKNPQEGLYNELQKDKMAEAYSEIGMKGERRRGKGHDGLYQGLSTATKDTYDALHMQALPPR

SEQ ID NO: 206805 - protein, 544 aa, Artificial Sequence
  Description of Artificial Sequence: Synthetic Chimeric Antigen Receptor
MLLLVTSLLLCELPHPAFLLIPQVQLQQSGPGLVKPSQTLSLTCAISGDSVSSNSAAWNWIRQSPSRGLEWLGRTYYRSKWYNDYAVSVKSRITINPDTSKNQFSLQLNSVTPEDTAVYYCAREVTGDLEDAFDIWGQGTMVTVSSGGGGSDIQMTQSPSSLSASVGDRVTITCRASQTIWSYLNWYQQRPGKAPNLLIYAASSLQSGVPSRFSGRGSGTDFTLTISSLQAEDFATYYCQQSYSIPQTFGQGTKLEIKAAAFVPVFLPAKPTTTPAPRPPTPAPTIASQPLSLRPEACRPAAGGAVHTRGLDFACDIYIWAPLAGTCGVLLLSLVITLYCNHRNRSKRSRLLHSDYMNMTPRRPGPTRKHYQPYAPPRDFAAYRSRFSVVKRGRKKLLYIFKQPFMRPVQTTQEEDGCSCRFPEEEEGGCELRVKFSRSADAPAYQQGQNQLYNELNLGRREEYDVLDKRRGRDPEMGGKPRRKNPQEGLYNELQKDKMAEAYSEIGMKGERRRGKGHDGLYQGLSTATKDTYDALHMQALPPR

SEQ ID NO: 206806 - protein, 729 aa, Artificial Sequence
  Description of Artificial Sequence: Synthetic Chimeric Antigen Receptor
QVQLQQSGPGLVKPSQTLSLTCAISGDSVSSNSAAWNWIRQSPSRGLEWLGRTYYRSKWYNDYAVSVKSRITINPDTSKNQFSLQLNSVTPEDTAVYYCAREVTGDLEDAFDIWGQGTMVTVSSGGGGSDIQMTQSPSSLSASVGDRVTITCRASQTIWSYLNWYQQRPGKAPNLLIYAASSLQSGVPSRFSGRGSGTDFTLTISSLQAEDFATYYCQQSYSIPQTFGQGTKLEIKGGGGSGGGGSGGGGSGGGGSGGGGSDIQMTQTTSSLSASLGDRVTISCRASQDISKYLNWYQQKPDGTVKLLIYHTSRLHSGVPSRFSGSGSGTDYSLTISNLEQEDIATYFCQQGNTLPYTFGGGTKLEITGSTSGSGKPGSGEGSTKGEVKLQESGPGLVAPSQSLSVTCTVSGVSLPDYGVSWIRQPPRKGLEWLGVIWGSETTYYNSALKSRLTIIKDNSKSQVFLKMNSLQTDDTAIYYCAKHYYYGGSYAMDYWGQGTSVTVSSTTTPAPRPPTPAPTIASQPLSLRPEACRPAAGGAVHTRGLDFACDIYIWAPLAGTCGVLLLSLVITLYCKRGRKKLLYIFKQPFMRPVQTTQEEDGCSCRFPEEEEGGCELRVKFSRSADAPAYKQGQNQLYNELNLGRREEYDVLDKRRGRDPEMGGKPRRKNPQEGLYNELQKDKMAEAYSEIGMKGERRRGKGHDGLYQGLSTATKDTYDALHMQALPPR

SEQ ID NO: 206807 - protein, 737 aa, Artificial Sequence
  Description of Artificial Sequence: Synthetic Chimeric Antigen Receptor
EVQLQQSGPGLVKPSQTLSLTCAISGDSVSSNSAAWNWIRQSPSRGLEWLGRTYYRSKWYNDYAVSVKSRITINPDTSKNQFSLQLNSVTPEDTAVYYCARDLGWIAVAGTFDYWGQGTLVTVSSGGGGSGGGGSGGGGSQSALTQPASVSGSPGQSITISCTGTSSDVGGYNYVSWYQQHPGKAPKLMIYDVSKRPSGVSNRFSGSKSGNTASLTISGLQAEDEADYYCSSYTSSSLNHVFGTGTKVTVLTGGGGSGGGGSGGGGSGGGGSEIVMTQSPATLSLSPGERATLSCRASQDISKYLNWYQQKPGQAPRLLIYHTSRLHSGIPARFSGSGSGTDYTLTISSLQPEDFAVYFCQQGNTLPYTFGQGTKLEIKGGGGSGGGGSGGGGSQVQLQESGPGLVKPSETLSLTCTVSGVSLPDYGVSWIRQPPGKGLEWIGVIWGSETTYYQSSLKSRVTISKDNSKNQVSLKLSSVTAADTAVYYCAKHYYYGGSYAMDYWGQGTLVTVSSTTTPAPRPPTPAPTIASQPLSLRPEACRPAAGGAVHTRGLDFACDIYIWAPLAGTCGVLLLSLVITLYCKRGRKKLLYIFKQPFMRPVQTTQEEDGCSCRFPEEEEGGCELRVKFSRSADAPAYKQGQNQLYNELNLGRREEYDVLDKRRGRDPEMGGKPRRKNPQEGLYNELQKDKMAEAYSEIGMKGERRRGKGHDGLYQGLSTATKDTYDALHMQALPPR

SEQ ID NO: 206808 - protein, 703 aa, Artificial Sequence
  Description of Artificial Sequence: Synthetic Chimeric Antigen Receptor
QVQLQQSGAEVKKPGSSVKVSCKASGGTFSSYAISWVRQAPGQGLEWMGGIIPILGIANYAQKFQGRVTITADESTSTAYMELSSLRSEDTAVYYCATGGSGRYALDIWGQGTMVTVSSGGGGSGGGGSGGGGSEIVLTQSPATLSLSPGERATLSCRASQSVSSYLAWYQQKPGQAPRLLIYDASNRATGIPARFSGSGSGTDFTLTISSLEPEDFAVYYCQQRSNWPPSYTFGQGTKLEIKRAEPKSCDKTHTCPPCPAPELLGGPSVFLFPPKPKDTLMISRTPEVTCVVVDVSHEDPEVKFNWYVDGVEVHNAKTKPREEQYNSTYRVVSVLTVLHQDWLNGKEYKCKVSNKALPAPIEKTISKAKGQPREPQVYTLPPSRDELTKNQVSLTCLVKGFYPSDIAVEWESNGQPENNYKTTPPVLDSDGSFFLYSKLTVDKSRWQQGNVFSCSVMHEALHNHYTQKSLSLSPGKKDPKAAAIEVMYPPPYLDNEKSNGTIIHVKGKHLCPSPLFPGPSKPFWVLVVVGGVLACYSLLVTVAFIIFWVRSKRSRLLHSDYMNMTPRRPGPTRKHYQPYAPPRDFAAYRSRVKFSRSADAPAYQQGQNQLYNELNLGRREEYDVLDKRRGRDPEMGGKPRRKNPQEGLYNELQKDKMAEAYSEIGMKGERRRGKGHDGLYQGLSTATKDTYDALHMQALPPR

SEQ ID NO: 206809 - protein, 223 aa, Artificial Sequence
  Description of Artificial Sequence: Synthetic Chimeric Antigen Receptor
TTTPAPRPPTPAPTIASQPLSLRPEACRPAAGGAVHTRGLDFACDIYIWAPLAGTCGVLLLSLVITLYCKRGRKKLLYIFKQPFMRPVQTTQEEDGCSCRFPEEEEGGCELRVKFSRSADAPAYKQGQNQLYNELNLGRREEYDVLDKRRGRDPEMGGKPRRKNPQEGLYNELQKDKMAEAYSEIGMKGERRRGKGHDGLYQGLSTATKDTYDALHMQALPPR

SEQ ID NO: 206810 - protein, 470 aa, Artificial Sequence
  Description of Artificial Sequence: Synthetic Chimeric Antigen Receptor
QVQLQQSGAEVKKPGSSVKVSCKASGGTFSSYAISWVRQAPGQGLEWMGGIIPILGIANYAQKFQGRVTITADESTSTAYMELSSLRSEDTAVYYCARGGAGGSGSYYPLIWGQGTTVTVSSGGGGSGGGGSGGGGSEIVLTQSPATLSLSPGERATLSCGASQSVSSSYLAWYQQKPGQAPRLLIYDASSRATGIPARFSGSGSGTDFTLTISSLEPEDFAVYYCQQRSSWPPTWTFGQGTKLEIKRAAAIEVMYPPPYLDNEKSNGTIIHVKGKHLCPSPLFPGPSKPFWVLVVVGGVLACYSLLVTVAFIIFWVRSKRSRLLHSDYMNMTPRRPGPTRKHYQPYAPPRDFAAYRSRVKFSRSADAPAYQQGQNQLYNELNLGRREEYDVLDKRRGRDPEMGGKPRRKNPQEGLYNELQKDKMAEAYSEIGMKGERRRGKGHDGLYQGLSTATKDTYDALHMQALPPR

SEQ ID NO: 206811 - protein, 705 aa, Artificial Sequence
  Description of Artificial Sequence: Synthetic Chimeric Antigen Receptor
QVQLVQSGAEVKKPGSSVKVSCKASGGTFSSYAISWVRQAPGQGLEWMGGIIPILGTANYAQKFQGRVTITADESTSTAYMELSSLRSEDTAVYYCARWGGGAFDIWGQGTMVTVSSGGGGSGGGGSGGGGSEIVLTQSPGTLSLSPGERATLSCRASQSVGGYLAWYQQKPGQAPRLLIYDASNRATGIPARFSGSGSGTDFTLTISSLEPEDFAVYYCQQRNNWPPMYTFGQGTKLEIKRAEPKSCDKTHTCPPCPAPELLGGPSVFLFPPKPKDTLMISRTPEVTCVVVDVSHEDPEVKFNWYVDGVEVHNAKTKPREEQYNSTYRVVSVLTVLHQDWLNGKEYKCKVSNKALPAPIEKTISKAKGQPREPQVYTLPPSRDELTKNQVSLTCLVKGFYPSDIAVEWESNGQPENNYKTTPPVLDSDGSFFLYSKLTVDKSRWQQGNVFSCSVMHEALHNHYTQKSLSLSPGKKDPKAAATTTPAPRPPTPAPTIASQPLSLRPEACRPAAGGAVHTRGLDFACDIYIWAPLAGTCGVLLLSLVITLYCKRGRKKLLYIFKQPFMRPVQTTQEEDGCSCRFPEEEEGGCELRVKFSRSADAPAYKQGQNQLYNELNLGRREEYDVLDKRRGRDPEMGGKPRRKNPQEGLYNELQKDKMAEAYSEIGMKGERRRGKGHDGLYQGLSTATKDTYDALHMQALPPR

SEQ ID NO: 206812 - protein, 707 aa, Artificial Sequence
  Description of Artificial Sequence: Synthetic Chimeric Antigen Receptor
QVQLQQSGAEVKKPGSSVKVSCKASGGTFSSYAISWVRQAPGQGLEWMGGIIPILGIANYAQKFQGRVTITADESTSTAYMELSSLRSEDTAVYYCATGGSGRYALDIWGQGTMVTVSSGGGGSGGGGSGGGGSEIVLTQSPATLSLSPGERATLSCRASQSVSSYLAWYQQKPGQAPRLLIYDASNRATGIPARFSGSGSGTDFTLTISSLEPEDFAVYYCQQRSNWPPSYTFGQGTKLEIKRAEPKSCDKTHTCPPCPAPELLGGPSVFLFPPKPKDTLMISRTPEVTCVVVDVSHEDPEVKFNWYVDGVEVHNAKTKPREEQYNSTYRVVSVLTVLHQDWLNGKEYKCKVSNKALPAPIEKTISKAKGQPREPQVYTLPPSRDELTKNQVSLTCLVKGFYPSDIAVEWESNGQPENNYKTTPPVLDSDGSFFLYSKLTVDKSRWQQGNVFSCSVMHEALHNHYTQKSLSLSPGKKDPKAAATTTPAPRPPTPAPTIASQPLSLRPEACRPAAGGAVHTRGLDFACDIYIWAPLAGTCGVLLLSLVITLYCKRGRKKLLYIFKQPFMRPVQTTQEEDGCSCRFPEEEEGGCELRVKFSRSADAPAYKQGQNQLYNELNLGRREEYDVLDKRRGRDPEMGGKPRRKNPQEGLYNELQKDKMAEAYSEIGMKGERRRGKGHDGLYQGLSTATKDTYDALHMQALPPR

SEQ ID NO: 206813 - protein, 711 aa, Artificial Sequence
  Description of Artificial Sequence: Synthetic Chimeric Antigen Receptor
QVQLQQSGAEVKKPGSSVKVSCKASGGTFSSYAISWVRQAPGQGLEWMGGIIPILGIANYAQKFQGRVTITADESTSTAYMELSSLRSEDTAVYYCARGGAGGSGSYYPLIWGQGTTVTVSSGGGGSGGGGSGGGGSEIVLTQSPATLSLSPGERATLSCGASQSVSSSYLAWYQQKPGQAPRLLIYDASSRATGIPARFSGSGSGTDFTLTISSLEPEDFAVYYCQQRSSWPPTWTFGQGTKLEIKRAEPKSCDKTHTCPPCPAPELLGGPSVFLFPPKPKDTLMISRTPEVTCVVVDVSHEDPEVKFNWYVDGVEVHNAKTKPREEQYNSTYRVVSVLTVLHQDWLNGKEYKCKVSNKALPAPIEKTISKAKGQPREPQVYTLPPSRDELTKNQVSLTCLVKGFYPSDIAVEWESNGQPENNYKTTPPVLDSDGSFFLYSKLTVDKSRWQQGNVFSCSVMHEALHNHYTQKSLSLSPGKKDPKAAATTTPAPRPPTPAPTIASQPLSLRPEACRPAAGGAVHTRGLDFACDIYIWAPLAGTCGVLLLSLVITLYCKRGRKKLLYIFKQPFMRPVQTTQEEDGCSCRFPEEEEGGCELRVKFSRSADAPAYKQGQNQLYNELNLGRREEYDVLDKRRGRDPEMGGKPRRKNPQEGLYNELQKDKMAEAYSEIGMKGERRRGKGHDGLYQGLSTATKDTYDALHMQALPPR

SEQ ID NO: 206814 - protein, 765 aa, Artificial Sequence
  Description of Artificial Sequence: Synthetic Chimeric Antigen Receptor
QVQLVQSGAEVKKPGSSVKVSCKASGGTFSSYAISWVRQAPGQGLEWMGGIIPILGTANYAQKFQGRVTITADESTSTAYMELSSLRSEDTAVYYCARWGGGAFDIWGQGTMVTVSSGGGGSGGGGSGGGGSEIVLTQSPGTLSLSPGERATLSCRASQSVGGYLAWYQQKPGQAPRLLIYDASNRATGIPARFSGSGSGTDFTLTISSLEPEDFAVYYCQQRNNWPPMYTFGQGTKLEIKRAEPKSCDKTHTCPPCPAPELLGGPSVFLFPPKPKDTLMISRTPEVTCVVVDVSHEDPEVKFNWYVDGVEVHNAKTKPREEQYNSTYRVVSVLTVLHQDWLNGKEYKCKVSNKALPAPIEKTISKAKGQPREPQVYTLPPSRDELTKNQVSLTCLVKGFYPSDIAVEWESNGQPENNYKTTPPVLDSDGSFFLYSKLTVDKSRWQQGNVFSCSVMHEALHNHYTQKSLSLSPGKKDPKAAAFVPVFLPAKPTTTPAPRPPTPAPTIASQPLSLRPEACRPAAGGAVHTRGLDFACDIYIWAPLAGTCGVLLLSLVITLYCNHRNRSKRSRLLHSDYMNMTPRRPGPTRKHYQPYAPPRDFAAYRSRFSVVKRGRKKLLYIFKQPFMRPVQTTQEEDGCSCRFPEEEEGGCELRVKFSRSADAPAYQQGQNQLYNELNLGRREEYDVLDKRRGRDPEMGGKPRRKNPQEGLYNELQKDKMAEAYSEIGMKGERRRGKGHDGLYQGLSTATKDTYDALHMQALPPR

SEQ ID NO: 206815 - protein, 767 aa, Artificial Sequence
  Description of Artificial Sequence: Synthetic Chimeric Antigen Receptor
QVQLQQSGAEVKKPGSSVKVSCKASGGTFSSYAISWVRQAPGQGLEWMGGIIPILGIANYAQKFQGRVTITADESTSTAYMELSSLRSEDTAVYYCATGGSGRYALDIWGQGTMVTVSSGGGGSGGGGSGGGGSEIVLTQSPATLSLSPGERATLSCRASQSVSSYLAWYQQKPGQAPRLLIYDASNRATGIPARFSGSGSGTDFTLTISSLEPEDFAVYYCQQRSNWPPSYTFGQGTKLEIKRAEPKSCDKTHTCPPCPAPELLGGPSVFLFPPKPKDTLMISRTPEVTCVVVDVSHEDPEVKFNWYVDGVEVHNAKTKPREEQYNSTYRVVSVLTVLHQDWLNGKEYKCKVSNKALPAPIEKTISKAKGQPREPQVYTLPPSRDELTKNQVSLTCLVKGFYPSDIAVEWESNGQPENNYKTTPPVLDSDGSFFLYSKLTVDKSRWQQGNVFSCSVMHEALHNHYTQKSLSLSPGKKDPKAAAFVPVFLPAKPTTTPAPRPPTPAPTIASQPLSLRPEACRPAAGGAVHTRGLDFACDIYIWAPLAGTCGVLLLSLVITLYCNHRNRSKRSRLLHSDYMNMTPRRPGPTRKHYQPYAPPRDFAAYRSRFSVVKRGRKKLLYIFKQPFMRPVQTTQEEDGCSCRFPEEEEGGCELRVKFSRSADAPAYQQGQNQLYNELNLGRREEYDVLDKRRGRDPEMGGKPRRKNPQEGLYNELQKDKMAEAYSEIGMKGERRRGKGHDGLYQGLSTATKDTYDALHMQALPPR

SEQ ID NO: 206816 - protein, 771 aa, Artificial Sequence
  Description of Artificial Sequence: Synthetic Chimeric Antigen Receptor
QVQLQQSGAEVKKPGSSVKVSCKASGGTFSSYAISWVRQAPGQGLEWMGGIIPILGIANYAQKFQGRVTITADESTSTAYMELSSLRSEDTAVYYCARGGAGGSGSYYPLIWGQGTTVTVSSGGGGSGGGGSGGGGSEIVLTQSPATLSLSPGERATLSCGASQSVSSSYLAWYQQKPGQAPRLLIYDASSRATGIPARFSGSGSGTDFTLTISSLEPEDFAVYYCQQRSSWPPTWTFGQGTKLEIKRAEPKSCDKTHTCPPCPAPELLGGPSVFLFPPKPKDTLMISRTPEVTCVVVDVSHEDPEVKFNWYVDGVEVHNAKTKPREEQYNSTYRVVSVLTVLHQDWLNGKEYKCKVSNKALPAPIEKTISKAKGQPREPQVYTLPPSRDELTKNQVSLTCLVKGFYPSDIAVEWESNGQPENNYKTTPPVLDSDGSFFLYSKLTVDKSRWQQGNVFSCSVMHEALHNHYTQKSLSLSPGKKDPKAAAFVPVFLPAKPTTTPAPRPPTPAPTIASQPLSLRPEACRPAAGGAVHTRGLDFACDIYIWAPLAGTCGVLLLSLVITLYCNHRNRSKRSRLLHSDYMNMTPRRPGPTRKHYQPYAPPRDFAAYRSRFSVVKRGRKKLLYIFKQPFMRPVQTTQEEDGCSCRFPEEEEGGCELRVKFSRSADAPAYQQGQNQLYNELNLGRREEYDVLDKRRGRDPEMGGKPRRKNPQEGLYNELQKDKMAEAYSEIGMKGERRRGKGHDGLYQGLSTATKDTYDALHMQALPPR

SEQ ID NO: 206817 - protein, 906 aa, Artificial Sequence
  Description of Artificial Sequence: Synthetic Chimeric Antigen Receptor
QVQLQQWGAGLLKPSETLSLTCAVYGGSFSAYYWSWIRQPPGKGLEWIGDINHGGGTNYNPSLKSRVTISVDTSKNQFSLKLNSVTAADTAVYYCASLTAYWGQGSLVTVSSGSTSGSGKPGSSEGSTKGDIQMTQSPTSLSASVGDRVTITCRASQGISSWLTWYQQKPEKAPKSLIYAASSLQSGVPSRFSGSGSGTDFTLTISSLQPEDFATYYCQQYDSYPITFGQGTRLEIKGSTSGSGKPGSSEGSTKGFWVLVVVGGVLACYSLLVTVAFIIFWVKRGRKKLLYIFKQPFMRPVQTTQEEDGCSCRFPEEEEGGCELQRRKYRSNKGESPVEPAEPCHYSCPREEEGSTIPIQEDYRKPEPACSPGSTSGSGKPGSSEGSTKGRVKFSRSADAPAYKQGQNQLYNELNLGRREEYDVLDKRRGRDPEMGGKPRRKNPQEGLYNELQKDKMAEAYSEIGMKGERRRGKGHDGLYQGLSTATKDTYDALHMQALPPRGSTSGSGKPGSSEGSTKGVGALESLRGNADLAYILSMEPCGHCLIINNVNFCRESGLRTRTGSNIDCEKLRRRFSSLHFMVEVKGDLTAKKMVLALLELAQQDHGALDCCVVVILSHGCQASHLQFPGAVYGTDGCPVSVEKIVNIFNGTSCPSLGGKPKLFFIQACGGEQKDHGFEVASTSPEDESPGSNPEPDATPFQEGLRTFDQLDAISSLPTPSDIFVSYSTFPGFVSWRDPKSGSWYVETLDDIFEQWAHSEDLQSLLLRVANAVSVKGIYKQMPGCFNFLRKKLFFKTSMGVQVETISPGDGRTFPKRGQTCVVHYTGMLEDGKKVDSSRDRNKPFKFMLGKQEVIRGWEEGVAQMSVGQRAKLTISPDYAYGATGHPGIIPPHATLVFDVELLKLE

SEQ ID NO: 206818 - protein, 470 aa, Artificial Sequence; identical to SEQ ID NO: 206810
  Description of Artificial Sequence: Synthetic Chimeric Antigen Receptor

SEQ ID NO: 206819 - protein, 474 aa, Artificial Sequence
  Description of Artificial Sequence: Synthetic Chimeric Antigen Receptor
QVQLQQSGAEVKKPGSSVKVSCKASGGTFSSYAISWVRQAPGQGLEWMGGIIPILGIANYAQKFQGRVTITADESTSTAYMELSSLRSEDTAVYYCARGGAGGSGSYYPLIWGQGTTVTVSSGGGGSGGGGSGGGGSEIVLTQSPATLSLSPGERATLSCGASQSVSSSYLAWYQQKPGQAPRLLIYDASSRATGIPARFSGSGSGTDFTLTISSLEPEDFAVYYCQQRSSWPPTWTFGQGTKLEIKRAAATTTPAPRPPTPAPTIASQPLSLRPEACRPAAGGAVHTRGLDFACDIYIWAPLAGTCGVLLLSLVITLYCKRGRKKLLYIFKQPFMRPVQTTQEEDGCSCRFPEEEEGGCELRVKFSRSADAPAYKQGQNQLYNELNLGRREEYDVLDKRRGRDPEMGGKPRRKNPQEGLYNELQKDKMAEAYSEIGMKGERRRGKGHDGLYQGLSTATKDTYDALHMQALPPR

SEQ ID NO: 206820 - protein, 534 aa, Artificial Sequence
  Description of Artificial Sequence: Synthetic Chimeric Antigen Receptor
QVQLQQSGAEVKKPGSSVKVSCKASGGTFSSYAISWVRQAPGQGLEWMGGIIPILGIANYAQKFQGRVTITADESTSTAYMELSSLRSEDTAVYYCARGGAGGSGSYYPLIWGQGTTVTVSSGGGGSGGGGSGGGGSEIVLTQSPATLSLSPGERATLSCGASQSVSSSYLAWYQQKPGQAPRLLIYDASSRATGIPARFSGSGSGTDFTLTISSLEPEDFAVYYCQQRSSWPPTWTFGQGTKLEIKRAAAFVPVFLPAKPTTTPAPRPPTPAPTIASQPLSLRPEACRPAAGGAVHTRGLDFACDIYIWAPLAGTCGVLLLSLVITLYCNHRNRSKRSRLLHSDYMNMTPRRPGPTRKHYQPYAPPRDFAAYRSRFSVVKRGRKKLLYIFKQPFMRPVQTTQEEDGCSCRFPEEEEGGCELRVKFSRSADAPAYQQGQNQLYNELNLGRREEYDVLDKRRGRDPEMGGKPRRKNPQEGLYNELQKDKMAEAYSEIGMKGERRRGKGHDGLYQGLSTATKDTYDALHMQALPPR

SEQ ID NO: 206821 - protein, 714 aa, Artificial Sequence
  Description of Artificial Sequence: Synthetic Chimeric Antigen Receptor
QVQLQQSGAEVKKPGSSVKVSCKASGGTFSSYAISWVRQAPGQGLEWMGGIIPILGIANYAQKFQGRVTITADESTSTAYMELSSLRSEDTAVYYCARGGAGGSGSYYPLIWGQGTTVTVSSGGGGSGGGGSGGGGSEIVLTQSPATLSLSPGERATLSCGASQSVSSSYLAWYQQKPGQAPRLLIYDASSRATGIPARFSGSGSGTDFTLTISSLEPEDFAVYYCQQRSSWPPTWTFGQGTKLEIKRAEPKSCDKTHTCPPCPAPELLGGPSVFLFPPKPKDTLMISRTPEVTCVVVDVSHEDPEVKFNWYVDGVEVHNAKTKPREEQYNSTYRVVSVLTVLHQDWLNGKEYKCKVSNKALPAPIEKTISKAKGQPREPQVYTLPPSRDELTKNQVSLTCLVKGFYPSDIAVEWESNGQPENNYKTTPPVLDSDGSFFLYSKLTVDKSRWQQGNVFSCSVMHEALHNHYTQKSLSLSPGKKDPKAAAIEGAAAAIEVMYPPPYLDNEKSNGTIIHVKGKHLCPSPLFPGPSKPFWVLVVVGGVLACYSLLVTVAFIIFWVRSKRSRLLHSDYMNMTPRRPGPTRKHYQPYAPPRDFAAYRSRVKFSRSADAPAYQQGQNQLYNELNLGRREEYDVLDKRRGRDPEMGGKPRRKNPQEGLYNELQKDKMAEAYSEIGMKGERRRGKGHDGLYQGLSTATKDTYDALHMQALPPR

SEQ ID NO: 206822 - protein, 464 aa, Artificial Sequence
  Description of Artificial Sequence: Synthetic Chimeric Antigen Receptor
QVQLVQSGAEVKKPGSSVKVSCKASGGTFSSYAISWVRQAPGQGLEWMGGIIPILGTANYAQKFQGRVTITADESTSTAYMELSSLRSEDTAVYYCARWGGGAFDIWGQGTMVTVSSGGGGSGGGGSGGGGSEIVLTQSPGTLSLSPGERATLSCRASQSVGGYLAWYQQKPGQAPRLLIYDASNRATGIPARFSGSGSGTDFTLTISSLEPEDFAVYYCQQRNNWPPMYTFGQGTKLEIKRAAAIEVMYPPPYLDNEKSNGTIIHVKGKHLCPSPLFPGPSKPFWVLVVVGGVLACYSLLVTVAFIIFWVRSKRSRLLHSDYMNMTPRRPGPTRKHYQPYAPPRDFAAYRSRVKFSRSADAPAYQQGQNQLYNELNLGRREEYDVLDKRRGRDPEMGGKPRRKNPQEGLYNELQKDKMAEAYSEIGMKGERRRGKGHDGLYQGLSTATKDTYDALHMQALPPR

SEQ ID NO: 206823 - protein, 468 aa, Artificial Sequence
  Description of Artificial Sequence: Synthetic Chimeric Antigen Receptor
QVQLVQSGAEVKKPGSSVKVSCKASGGTFSSYAISWVRQAPGQGLEWMGGIIPILGTANYAQKFQGRVTITADESTSTAYMELSSLRSEDTAVYYCARWGGGAFDIWGQGTMVTVSSGGGGSGGGGSGGGGSEIVLTQSPGTLSLSPGERATLSCRASQSVGGYLAWYQQKPGQAPRLLIYDASNRATGIPARFSGSGSGTDFTLTISSLEPEDFAVYYCQQRNNWPPMYTFGQGTKLEIKRAAATTTPAPRPPTPAPTIASQPLSLRPEACRPAAGGAVHTRGLDFACDIYIWAPLAGTCGVLLLSLVITLYCKRGRKKLLYIFKQPFMRPVQTTQEEDGCSCRFPEEEEGGCELRVKFSRSADAPAYKQGQNQLYNELNLGRREEYDVLDKRRGRDPEMGGKPRRKNPQEGLYNELQKDKMAEAYSEIGMKGERRRGKGHDGLYQGLSTATKDTYDALHMQALPPR

SEQ ID NO: 206824 - protein, 528 aa, Artificial Sequence
  Description of Artificial Sequence: Synthetic Chimeric Antigen Receptor
QVQLVQSGAEVKKPGSSVKVSCKASGGTFSSYAISWVRQAPGQGLEWMGGIIPILGTANYAQKFQGRVTITADESTSTAYMELSSLRSEDTAVYYCARWGGGAFDIWGQGTMVTVSSGGGGSGGGGSGGGGSEIVLTQSPGTLSLSPGERATLSCRASQSVGGYLAWYQQKPGQAPRLLIYDASNRATGIPARFSGSGSGTDFTLTISSLEPEDFAVYYCQQRNNWPPMYTFGQGTKLEIKRAAAFVPVFLPAKPTTTPAPRPPTPAPTIASQPLSLRPEACRPAAGGAVHTRGLDFACDIYIWAPLAGTCGVLLLSLVITLYCNHRNRSKRSRLLHSDYMNMTPRRPGPTRKHYQPYAPPRDFAAYRSRFSVVKRGRKKLLYIFKQPFMRPVQTTQEEDGCSCRFPEEEEGGCELRVKFSRSADAPAYQQGQNQLYNELNLGRREEYDVLDKRRGRDPEMGGKPRRKNPQEGLYNELQKDKMAEAYSEIGMKGERRRGKGHDGLYQGLSTATKDTYDALHMQALPPR

SEQ ID NO: 206825 - protein, 701 aa, Artificial Sequence
  Description of Artificial Sequence: Synthetic Chimeric Antigen Receptor
QVQLVQSGAEVKKPGSSVKVSCKASGGTFSSYAISWVRQAPGQGLEWMGGIIPILGTANYAQKFQGRVTITADESTSTAYMELSSLRSEDTAVYYCARWGGGAFDIWGQGTMVTVSSGGGGSGGGGSGGGGSEIVLTQSPGTLSLSPGERATLSCRASQSVGGYLAWYQQKPGQAPRLLIYDASNRATGIPARFSGSGSGTDFTLTISSLEPEDFAVYYCQQRNNWPPMYTFGQGTKLEIKRAEPKSCDKTHTCPPCPAPELLGGPSVFLFPPKPKDTLMISRTPEVTCVVVDVSHEDPEVKFNWYVDGVEVHNAKTKPREEQYNSTYRVVSVLTVLHQDWLNGKEYKCKVSNKALPAPIEKTISKAKGQPREPQVYTLPPSRDELTKNQVSLTCLVKGFYPSDIAVEWESNGQPENNYKTTPPVLDSDGSFFLYSKLTVDKSRWQQGNVFSCSVMHEALHNHYTQKSLSLSPGKKDPKAAAIEVMYPPPYLDNEKSNGTIIHVKGKHLCPSPLFPGPSKPFWVLVVVGGVLACYSLLVTVAFIIFWVRSKRSRLLHSDYMNMTPRRPGPTRKHYQPYAPPRDFAAYRSRVKFSRSADAPAYQQGQNQLYNELNLGRREEYDVLDKRRGRDPEMGGKPRRKNPQEGLYNELQKDKMAEAYSEIGMKGERRRGKGHDGLYQGLSTATKDTYDALHMQALPPR

SEQ ID NO: 206826 - protein, 466 aa, Artificial Sequence
  Description of Artificial Sequence: Synthetic Chimeric Antigen Receptor
QVQLQQSGAEVKKPGSSVKVSCKASGGTFSSYAISWVRQAPGQGLEWMGGIIPILGIANYAQKFQGRVTITADESTSTAYMELSSLRSEDTAVYYCATGGSGRYALDIWGQGTMVTVSSGGGGSGGGGSGGGGSEIVLTQSPATLSLSPGERATLSCRASQSVSSYLAWYQQKPGQAPRLLIYDASNRATGIPARFSGSGSGTDFTLTISSLEPEDFAVYYCQQRSNWPPSYTFGQGTKLEIKRAAAIEVMYPPPYLDNEKSNGTIIHVKGKHLCPSPLFPGPSKPFWVLVVVGGVLACYSLLVTVAFIIFWVRSKRSRLLHSDYMNMTPRRPGPTRKHYQPYAPPRDFAAYRSRVKFSRSADAPAYQQGQNQLYNELNLGRREEYDVLDKRRGRDPEMGGKPRRKNPQEGLYNELQKDKMAEAYSEIGMKGERRRGKGHDGLYQGLSTATKDTYDALHMQALPPR

SEQ ID NO: 206827 - protein, 470 aa, Artificial Sequence
  Description of Artificial Sequence: Synthetic Chimeric Antigen Receptor
QVQLQQSGAEVKKPGSSVKVSCKASGGTFSSYAISWVRQAPGQGLEWMGGIIPILGIANYAQKFQGRVTITADESTSTAYMELSSLRSEDTAVYYCATGGSGRYALDIWGQGTMVTVSSGGGGSGGGGSGGGGSEIVLTQSPATLSLSPGERATLSCRASQSVSSYLAWYQQKPGQAPRLLIYDASNRATGIPARFSGSGSGTDFTLTISSLEPEDFAVYYCQQRSNWPPSYTFGQGTKLEIKRAAATTTPAPRPPTPAPTIASQPLSLRPEACRPAAGGAVHTRGLDFACDIYIWAPLAGTCGVLLLSLVITLYCKRGRKKLLYIFKQPFMRPVQTTQEEDGCSCRFPEEEEGGCELRVKFSRSADAPAYKQGQNQLYNELNLGRREEYDVLDKRRGRDPEMGGKPRRKNPQEGLYNELQKDKMAEAYSEIGMKGERRRGKGHDGLYQGLSTATKDTYDALHMQALPPR

SEQ ID NO: 206828 - protein, 530 aa, Artificial Sequence
  Description of Artificial Sequence: Synthetic Chimeric Antigen Receptor
QVQLQQSGAEVKKPGSSVKVSCKASGGTFSSYAISWVRQAPGQGLEWMGGIIPILGIANYAQKFQGRVTITADESTSTAYMELSSLRSEDTAVYYCATGGSGRYALDIWGQGTMVTVSSGGGGSGGGGSGGGGSEIVLTQSPATLSLSPGERATLSCRASQSVSSYLAWYQQKPGQAPRLLIYDASNRATGIPARFSGSGSGTDFTLTISSLEPEDFAVYYCQQRSNWPPSYTFGQGTKLEIKRAAAFVPVFLPAKPTTTPAPRPPTPAPTIASQPLSLRPEACRPAAGGAVHTRGLDFACDIYIWAPLAGTCGVLLLSLVITLYCNHRNRSKRSRLLHSDYMNMTPRRPGPTRKHYQPYAPPRDFAAYRSRFSVVKRGRKKLLYIFKQPFMRPVQTTQEEDGCSCRFPEEEEGGCELRVKFSRSADAPAYQQGQNQLYNELNLGRREEYDVLDKRRGRDPEMGGKPRRKNPQEGLYNELQKDKMAEAYSEIGMKGERRRGKGHDGLYQGLSTATKDTYDALHMQALPPR

SEQ ID NO: 206829 - protein, 496 aa, Artificial Sequence
  Description of Artificial Sequence: Synthetic Chimeric Antigen Receptor
MVATLLVTSLLLCELPHPAFLLIPDTEVQLVESGGGLVQPGGSLRLSCAASGFTFSSFGMHWVRQAPGKGLEWVAYISSDSSAIYYADTVKGRFTISRDNAKNSLYLQMNSLRDEDTAVYYCGRGRENIYYGSRLDYWGQGTTVTVSSGGGGSGGGGSGGGGSDIQLTQSPSFLSASVGDRVTITCKASQNVDTNVAWYQQKPGKAPKALIYSASYRYSGVPSRFSGSGSGTDFTLTISSLQPEDFATYYCQQYNNYPFTFGQGTKLEIKAAATTTPAPRPPTPAPTIASQPLSLRPEACRPAAGGAVHTRGLDFACDIYIWAPLAGTCGVLLLSLVITLYCKRGRKKLLYIFKQPFMRPVQTTQEEDGCSCRFPEEEEGGCELRVKFSRSADAPAYKQGQNQLYNELNLGRREEYDVLDKRRGRDPEMGGKPRRKNPQEGLYNELQKDKMAEAYSEIGMKGERRRGKGHDGLYQGLSTATKDTYDALHMQALPPR

SEQ ID NO: 206830 - protein, 978 aa, Artificial Sequence
  Description of Artificial Sequence: Synthetic Chimeric Antigen Receptor
MDFQVQIFSFLLISASVIMSRMAQVQLQQSGAELARPGASVKMSCKASGYTFTTYTIHWVRRRPGHDLEWIGYINPSSGCSDYNQNFKGKTTLTADKSSNTAYMQLNSLTSEDSAVYYCARRADYGNYEYTWFAYWGQGTTVTVSSSGGGSGGGGSGGGGSVIELTQSPKFMSTSVGDRVNVTYKASQNVGTNVAWFQQKPGQSPKVLIYSASYRYSGVPDRFTGSGSGTDFTLTISNVQSEDLAEYFCQQYHTYPLTFGGGTKLEIKRAAAGGGGSGGGGSGGGGSGGGGSGGGGSGGGGSGGGGSGGGGSVDMAQVQLQESGGGLVQPGGSLKLSCAASGFTFSSYGMSWVRQTPDKRLELVATINSNGGSTYYPDSVKGRFTISRDNAKNTLYLQMSSLKSEDTAMYYCARDRDGYDEGFDYWGQGTTVTVSSGGGGSGGGGSGGGGSDIELTQSPSIMSASPGEKVTMTCSASSSVSYMHWYQQKSGTSPKRWIYDTSKLASGVPARFSGSGSGTSYSLTISSMEAEDAATYYCQQWSSNPPTLGRRTQLQLKRADPAEPKSPDKTHTCPPCPAPPVAGPSVFLFPPKPKDTLMIARTPEVTCVVVDVSHEDPEVKFNWYVDGVEVHNAKTKPREEQYNSTYRVVSVLTVLHQDWLNGKEYKCKVSNKALPAPIEKTISKAKGQPREPQVYTLPPSRDELTKNQVSLTCLVKGFYPSDIAVEWESNGQPENNYKTTPPVLDSDGSFFLYSKLTVDKSRWQQGNVFSCSVMHEALHNHYTQKSLSLSPGKKDPKFWVLVVVGGVLACYSLLVTVAFIIFWVRSKRSRLLHSDYMNMTPRRPGPTRKHYQAYAAARDFAAYRSLRVKFSRSADAPAYQQGQNQLYNELNLGRREEYDVLDKRRGRDPEMGGKPRRKNPQEGLYNELQKDKMAEAYSEIGMKGERRRGKGHDGLYQGLSTATKDTYDALHMQALPPR

SEQ ID NO: 206831 - protein, 252 aa, Artificial Sequence; identical to SEQ ID NO: 205242
  Description of Artificial Sequence: Synthetic Chimeric Antigen Receptor

SEQ ID NO: 206832 - protein, 494 aa, Artificial Sequence
  Description of Artificial Sequence: Synthetic Chimeric Antigen Receptor
MALPVTALLLPLALLLHAARPQVQLVQSGAEVKKPGESLKISCKGSGYSFTSYWIGWVRQMPGKGLEWMGIIYPGDSDTRYSPSFQGQVTISADKSISTAYLQWSSLKASDTAMYYCARLGGSLPDYGMDVWGQGTMVTVSSASGGGGSGGGGSGGGGSEIVLTQSPLSLPVTPGEPASISCRSSQSLLHSNGYNYLDWYLQKPGQSPQLLIYLGSNRASGVPDRFSGSGSGTDFTLKISRVEAEDVGVYYCMQALQTLITFGQGTKVDIKTTTPAPRPPTPAPTIASQPLSLRPEACRPAAGGAVHTRGLDFACDIYIWAPLAGTCGVLLLSLVITLYCKRGRKKLLYIFKQPFMRPVQTTQEEDGCSCRFPEEEEGGCELRVKFSRSADAPAYKQGQNQLYNELNLGRREEYDVLDKRRGRDPEMGGKPRRKNPQEGLYNELQKDKMAEAYSEIGMKGERRRGKGHDGLYQGLSTATKDTYDALHMQALPPR

SEQ ID NO: 206833 - protein, 527 aa, Artificial Sequence
  Description of Artificial Sequence: Synthetic Chimeric Antigen Receptor
GSATMAADSQTPWLLTFSLLCLLWPQEAGALPLLHESGAEVAKPGASVKMSCKASGYTFTTYWMHWIKQRPGQGLEWIGYINPSTGYTDYNQNFKDKATLTADKSSRTAYMQLSSLTSEDSTVYYCTRRGPSYGNHGAWFPYWGQGTLVTVSAVSSGGGGSGGGGSGGGGSTNIVMTQSPRSMSMSVGERVTLSCKASENVDTYVSWYQQKPEQSPKLLIYGASNRYTGVPDRFTGSGSATDFTLTISSVQAEDLADYHCGQSYRYPPTFGGGTKLEITRLSNSIMYFSHFVPVFLPAKPTTTPAPRPPTPAPTIASQPLSLRPEACRPAAGGAVHTRGLDFACDIYIWAPLAGTCGVLLLSLVITLYCRSKRGRKKLLYIFKQPFMRPVQTTQEEDGCSCRFPEEEEGGCELEFRVKFSRSADAPAYQQGQNQLYNELNLGRREEYDVLDKRRGRDPEMGGKPRRKNPQEGLYNELQKDKMAEAYSEIGMKGERRRGKGHDGLYQGLSTATKDTYDALHMQALPPR

SEQ ID NO: 206834 - protein, 442 aa, Artificial Sequence
  Description of Artificial Sequence: Synthetic Chimeric Antigen Receptor
PLALLLHAARPEVQLLESGGGLVQPGGSLRLSCAVSGFTFNSFAMSWVRQAPGKGLEWVSAISGSGGGTYYADSVKGRFTISRDNSKNTLYLQMNSLRAEDTAVYFCAKDKILWFGEPVFDYWGQGTLVTVSSASGGGGSGGGGSGGGGSEIVLTQSPATLSLSPGERATLSCRASQSVSSYLAWYQQKPGQAPRLLIYDASNRATGIPARFSGSGSGTDFTLTISSLEPEDFAVYYCQQRSNWPPTFGQGTKVEIKGLAVSTISSFFPPGYQIYIWAPLAGTCGVLLLSLVITLYCKRGRKKLLYIFKQPFMRPVQTTQEEDGCSCRFPEEEEGGCELRVKFSRSADAPAYQQGQNQLYNELNLGRREEYDVLDKRRGRDPEMGGKPRRKNPQEGLYNELQKDKMAEAYSEIGMKGERRRGKGHDGLYQGLSTATKDTYDA

SEQ ID NO: 206835 - protein, 455 aa, Artificial Sequence
  Description of Artificial Sequence: Synthetic Chimeric Antigen Receptor
MALPVTALLLPLALLLHAARPQVQLQQSGPELVRPGTFVKISCKASGYTFTNYDINWVNQRPGQGLEWIGWIYPGDGSTKYNEKFKAKATLTADKSSSTAYLQLNNLTSENSAVYFCASGYEDAMDYWGQGTSVTVSSGGGGSGGGGSGGGGSDIKMTQSPSSMYASLGERVIINCKASQDINSYLSWFQQKPGKSPKTLIYRANRLVDGVPSRFSGSGSGQDYSLTISSLEYEDMGIYYCLQYDEFPLTFGAGTKLELKRGLAVSTISSFFPPGYQIYIWAPLAGTCGVLLLSLVITLYCKRGRKKLLYIFKQPFMRPVQTTQEEDGCSCRFPEEEEGGCELRVKFSRSADAPAYQQGQNQLYNELNLGRREEYDVLDKRRGRDPEMGGKPRRKNPQEGLYNELQKDKMAEAYSEIGMKGERRRGKGHDGLYQGLSTATKDTYDALHMQALPPR

SEQ ID NO: 206836 - protein, 457 aa, Artificial Sequence
  Description of Artificial Sequence: Synthetic Chimeric Antigen Receptor
MALPVTALLLPLALLLHAARPEVQLQQSGPELVKPGASVKISCKASGYTFTDYNMHWVKQSHGKSLEWIGYIYPYNGGTGYNQKFKSKATLTVDNSSSTAYMDVRSLTSEDSAVYYCARGRPAMDYWGQGTSVTVSSGGGGSGGGGSGGGGSDIVLTQSPASLAVSLGQRATISCRASESVDNYGISFMNWFQQKPGQPPKLLIYAASNQGSGVPARFSGSGSGTDFSLNIHPMEEDDTAMYFCQQSKEVPWTFGGGTKLEIKGLAVSTISSFFPPGYQIYIWAPLAGTCGVLLLSLVITLYCKRGRKKLLYIFKQPFMRPVQTTQEEDGCSCRFPEEEEGGCELRVKFSRSADAPAYQQGQNQLYNELNLGRREEYDVLDKRRGRDPEMGGKPRRKNPQEGLYNELQKDKMAEAYSEIGMKGERRRGKGHDGLYQGLSTATKDTYDALHMQALPPR

SEQ ID NO: 206837 - protein, 458 aa, Artificial Sequence
  Description of Artificial Sequence: Synthetic Chimeric Antigen Receptor
MALPVTALLLPLALLLHAARPQVQLQQSGPELVRPGTFVKISCKASGYTFTNYDINWVNQRPGQGLEWIGWIYPGDGSTKYNEKFKAKATLTADKSSSTAYLQLNNLTSENSAVYFCASGYEDAMDYWGQGTSVTVSSGGGGSGGGGSGGGGSDIKMTQSPSSMYASLGERVIINCKASQDINSYLSWFQQKPGKSPKTLIYRANRLVDGVPSRFSGSGSGQDYSLTISSLEYEDMGIYYCLQYDEFPLTFGAGTKLELKRGLAVSTISSFFPPGYQIISFFLALTSTALLFLLFFLTLRFSVVKRGRKKLLYIFKQPFMRPVQTTQEEDGCSCRFPEEEEGGCELRVKFSRSADAPAYQQGQNQLYNELNLGRREEYDVLDKRRGRDPEMGGKPRRKNPQEGLYNELQKDKMAEAYSEIGMKGERRRGKGHDGLYQGLSTATKDTYDALHMQALPPR

SEQ ID NO: 206838 - protein, 460 aa, Artificial Sequence
  Description of Artificial Sequence: Synthetic Chimeric Antigen Receptor
MALPVTALLLPLALLLHAARPEVQLQQSGPELVKPGASVKISCKASGYTFTDYNMHWVKQSHGKSLEWIGYIYPYNGGTGYNQKFKSKATLTVDNSSSTAYMDVRSLTSEDSAVYYCARGRPAMDYWGQGTSVTVSSGGGGSGGGGSGGGGSDIVLTQSPASLAVSLGQRATISCRASESVDNYGISFMNWFQQKPGQPPKLLIYAASNQGSGVPARFSGSGSGTDFSLNIHPMEEDDTAMYFCQQSKEVPWTFGGGTKLEIKGLAVSTISSFFPPGYQIISFFLALTSTALLFLLFFLTLRFSVVKRGRKKLLYIFKQPFMRPVQTTQEEDGCSCRFPEEEEGGCELRVKFSRSADAPAYQQGQNQLYNELNLGRREEYDVLDKRRGRDPEMGGKPRRKNPQEGLYNELQKDKMAEAYSEIGMKGERRRGKGHDGLYQGLSTATKDTYDALHMQALPPR

SEQ ID NO: 206839 - protein, 461 aa, Artificial Sequence
  Description of Artificial Sequence: Synthetic Chimeric Antigen Receptor
MALPVTALLLPLALLLHAARPQVQLQQPGAEVVKPGASVKMSCKASGYTFTSYYIHWIKQTPGQGLEWVGVIYPGNDDISYNQKFKGKATLTADKSSTTAYMQLSSLTSEDSAVYYCAREVRLRYFDVWGAGTTVTVSSGGGGSGGGGSGGGGSNIMLTQSPSSLAVSAGEKVTMSCKSSQSVFFSSSQKNYLAWYQQIPGQSPKLLIYWASTRESGVPDRFTGSGSGTDFTLTISSVQSEDLAIYYCHQYLSSRTFGGGTKLEIKRGLAVSTISSFFPPGYQIYIWAPLAGTCGVLLLSLVITLYCKRGRKKLLYIFKQPFMRPVQTTQEEDGCSCRFPEEEEGGCELRVKFSRSADAPAYQQGQNQLYNELNLGRREEYDVLDKRRGRDPEMGGKPRRKNPQEGLYNELQKDKMAEAYSEIGMKGERRRGKGHDGLYQGLSTATKDTYDALHMQALPPR

SEQ ID NO: 206840 - protein, 462 aa, Artificial Sequence
  Description of Artificial Sequence: Synthetic Chimeric Antigen Receptor
MALPVTALLLPLALLLHAARPQAYLQQSGAELVRSGASVKMSCKASGYTFTSYNLHWVKQTPGQGLEWIGYIYPGNGGTNYNQKFKGKATLTADTSSSTAYMQISSLTSEDSAVYFCARGGIYYYGSSLDYWGQGTTLTVSSGGGGSGGGGSGGGGSNIVLTQSPASLAVSLGQRATISCRASESVDNYGTTFMYWYQQKPGQPPKLLIYLASNLESGVPARFSGSGSGTDFTLTIDPVEADDAATYYCQQNKEDPWTFGGGTKLEIKGLAVSTISSFFPPGYQIYIWAPLAGTCGVLLLSLVITLYCKRGRKKLLYIFKQPFMRPVQTTQEEDGCSCRFPEEEEGGCELRVKFSRSADAPAYQQGQNQLYNELNLGRREEYDVLDKRRGRDPEMGGKPRRKNPQEGLYNELQKDKMAEAYSEIGMKGERRRGKGHDGLYQGLSTATKDTYDALHMQALPPR

SEQ ID NO: 206841 - protein, 464 aa, Artificial Sequence
  Description of Artificial Sequence: Synthetic Chimeric Antigen Receptor
MALPVTALLLPLALLLHAARPQVQLQQPGAEVVKPGASVKMSCKASGYTFTSYYIHWIKQTPGQGLEWVGVIYPGNDDISYNQKFKGKATLTADKSSTTAYMQLSSLTSEDSAVYYCAREVRLRYFDVWGAGTTVTVSSGGGGSGGGGSGGGGSNIMLTQSPSSLAVSAGEKVTMSCKSSQSVFFSSSQKNYLAWYQQIPGQSPKLLIYWASTRESGVPDRFTGSGSGTDFTLTISSVQSEDLAIYYCHQYLSSRTFGGGTKLEIKRGLAVSTISSFFPPGYQIISFFLALTSTALLFLLFFLTLRFSVVKRGRKKLLYIFKQPFMRPVQTTQEEDGCSCRFPEEEEGGCELRVKFSRSADAPAYQQGQNQLYNELNLGRREEYDVLDKRRGRDPEMGGKPRRKNPQEGLYNELQKDKMAEAYSEIGMKGERRRGKGHDGLYQGLSTATKDTYDALHMQALPPR

SEQ ID NO: 206842 - protein, 465 aa, Artificial Sequence
  Description of Artificial Sequence: Synthetic Chimeric Antigen Receptor
MALPVTALLLPLALLLHAARPEVKLQESGPELVKPGASVKMSCKASGYKFTDYVVHWLKQKPGQGLEWIGYINPYNDGTKYNEKFKGKATLTSDKSSSTAYMEVSSLTSEDSAVYYCARDYRYEVYGMDYWGQGTSVTVSSGGGGSGGGGSGGGGSDIVLTQSPTIMSASPGERVTMTCTASSSVNYIHWYQQKSGDSPLRWIFDTSKVASGVPARFSGSGSGTSYSLTISTMEAEDAATYYCQQWRSYPLTFGDGTRLELKRADAAPTVSGLAVSTISSFFPPGYQIYIWAPLAGTCGVLLLSLVITLYCKRGRKKLLYIFKQPFMRPVQTTQEEDGCSCRFPEEEEGGCELRVKFSRSADAPAYQQGQNQLYNELNLGRREEYDVLDKRRGRDPEMGGKPRRKNPQEGLYNELQKDKMAEAYSEIGMKGERRRGKGHDGLYQGLSTATKDTYDALHMQALPPR

SEQ ID NO: 206843 - protein, 468 aa, Artificial Sequence
  Description of Artificial Sequence: Synthetic Chimeric Antigen Receptor
MALPVTALLLPLALLLHAARPEVKLQESGPELVKPGASVKMSCKASGYKFTDYVVHWLKQKPGQGLEWIGYINPYNDGTKYNEKFKGKATLTSDKSSSTAYMEVSSLTSEDSAVYYCARDYRYEVYGMDYWGQGTSVTVSSGGGGSGGGGSGGGGSDIVLTQSPTIMSASPGERVTMTCTASSSVNYIHWYQQKSGDSPLRWIFDTSKVASGVPARFSGSGSGTSYSLTISTMEAEDAATYYCQQWRSYPLTFGDGTRLELKRADAAPTVSGLAVSTISSFFPPGYQIISFFLALTSTALLFLLFFLTLRFSVVKRGRKKLLYIFKQPFMRPVQTTQEEDGCSCRFPEEEEGGCELRVKFSRSADAPAYQQGQNQLYNELNLGRREEYDVLDKRRGRDPEMGGKPRRKNPQEGLYNELQKDKMAEAYSEIGMKGERRRGKGHDGLYQGLSTATKDTYDALHMQALPPR

SEQ ID NO: 206844 - protein, 484 aa, Artificial Sequence
  Description of Artificial Sequence: Synthetic Chimeric Antigen Receptor
MALPVTALLLPLALLLHAARPQVQLQQSGPELVRPGTFVKISCKASGYTFTNYDINWVNQRPGQGLEWIGWIYPGDGSTKYNEKFKAKATLTADKSSSTAYLQLNNLTSENSAVYFCASGYEDAMDYWGQGTSVTVSSGGGGSGGGGSGGGGSDIKMTQSPSSMYASLGERVIINCKASQDINSYLSWFQQKPGKSPKTLIYRANRLVDGVPSRFSGSGSGQDYSLTISSLEYEDMGIYYCLQYDEFPLTFGAGTKLELKRTTTPAPRPPTPAPTIASQPLSLRPEACRPAAGGAVHTRGLDFACDIYIWAPLAGTCGVLLLSLVITLYCKRGRKKLLYIFKQPFMRPVQTTQEEDGCSCRFPEEEEGGCELRVKFSRSADAPAYQQGQNQLYNELNLGRREEYDVLDKRRGRDPEMGGKPRRKNPQEGLYNELQKDKMAEAYSEIGMKGERRRGKGHDGLYQGLSTATKDTYDALHMQALPPR

SEQ ID NO: 206845 - protein, 484 aa, Artificial Sequence
  Description of Artificial Sequence: Synthetic Chimeric Antigen Receptor
MALPVTALLLPLALLLHAARPQVQLVQSGGDLAQPGRSLRLSCAASGFTFDDYAMHWVRQAPGKGLEWVAVIWPDGGQKYYGDSVKGRFTVSRDNPKNTLYLQMNSLRAEDTAIYYCVRHFNAWDYWGQGTLVTVSSASGGGGSGGGGSGGGGSDIQLTQSPSSLSAYVGGRVTITCQASQGISQFLNWFQQKPGKAPKLLISDASNLEPGVPSRFSGSGSGTDFTFTITNLQPEDIATYYCQQYDDLPLTFGGGTKVEIKTTTPAPRPPTPAPTIASQPLSLRPEACRPAAGGAVHTRGLDFACDIYIWAPLAGTCGVLLLSLVITLYCKRGRKKLLYIFKQPFMRPVQTTQEEDGCSCRFPEEEEGGCELRVKFSRSADAPAYKQGQNQLYNELNLGRREEYDVLDKRRGRDPEMGGKPRRKNPQEGLYNELQKDKMAEAYSEIGMKGERRRGKGHDGLYQGLSTATKDTYDALHMQALPPR

SEQ ID NO: 206846 - protein, 486 aa, Artificial Sequence
  Description of Artificial Sequence: Synthetic Chimeric Antigen Receptor
MALPVTALLLPLALLLHAARPEVQLQQSGPELVKPGASVKISCKASGYTFTDYNMHWVKQSHGKSLEWIGYIYPYNGGTGYNQKFKSKATLTVDNSSSTAYMDVRSLTSEDSAVYYCARGRPAMDYWGQGTSVTVSSGGGGSGGGGSGGGGSDIVLTQSPASLAVSLGQRATISCRASESVDNYGISFMNWFQQKPGQPPKLLIYAASNQGSGVPARFSGSGSGTDFSLNIHPMEEDDTAMYFCQQSKEVPWTFGGGTKLEIKTTTPAPRPPTPAPTIASQPLSLRPEACRPAAGGAVHTRGLDFACDIYIWAPLAGTCGVLLLSLVITLYCKRGRKKLLYIFKQPFMRPVQTTQEEDGCSCRFPEEEEGGCELRVKFSRSADAPAYQQGQNQLYNELNLGRREEYDVLDKRRGRDPEMGGKPRRKNPQEGLYNELQKDKMAEAYSEIGMKGERRRGKGHDGLYQGLSTATKDTYDALHMQALPPR

SEQ ID NO: 206847 - protein, 487 aa, Artificial Sequence
  Description of Artificial Sequence: Synthetic Chimeric Antigen Receptor
MALPVTALLLPLALLLHAARPQVQLQQSGPELVRPGTFVKISCKASGYTFTNYDINWVNQRPGQGLEWIGWIYPGDGSTKYNEKFKAKATLTADKSSSTAYLQLNNLTSENSAVYFCASGYEDAMDYWGQGTSVTVSSGGGGSGGGGSGGGGSDIKMTQSPSSMYASLGERVIINCKASQDINSYLSWFQQKPGKSPKTLIYRANRLVDGVPSRFSGSGSGQDYSLTISSLEYEDMGIYYCLQYDEFPLTFGAGTKLELKRTTTPAPRPPTPAPTIASQPLSLRPEACRPAAGGAVHTRGLDFACDIISFFLALTSTALLFLLFFLTLRFSVVKRGRKKLLYIFKQPFMRPVQTTQEEDGCSCRFPEEEEGGCELRVKFSRSADAPAYQQGQNQLYNELNLGRREEYDVLDKRRGRDPEMGGKPRRKNPQEGLYNELQKDKMAEAYSEIGMKGERRRGKGHDGLYQGLSTATKDTYDALHMQALPPR

SEQ ID NO: 206848 - protein, 488 aa, Artificial Sequence
  Description of Artificial Sequence: Synthetic Chimeric Antigen Receptor
MALPVTALLLPLALLLHAARPQVQLVQSGAEVKKPGESLKISCKGSGYSFTNYWIGWVRQMPGKGLEWMGIIYPGDSDTRYSPSFQGQVTISADKSISTAYLQWSSLKASDTAMYYCARHGPSSWGEFDYWGQGTLVTVSSASGGGGSGGGGSGGGGSDIRLTQSPSSLSASVGDRVTITCRASQSISSYLNWYQQKPGKAPKLLIYAASSLQSGVPSRFSGSGSGTDFTLTISSLQPEDFATYYCQQSYSTPLTFGGGTKVDIKTTTPAPRPPTPAPTIASQPLSLRPEACRPAAGGAVHTRGLDFACDIYIWAPLAGTCGVLLLSLVITLYCKRGRKKLLYIFKQPFMRPVQTTQEEDGCSCRFPEEEEGGCELRVKFSRSADAPAYKQGQNQLYNELNLGRREEYDVLDKRRGRDPEMGGKPRRKNPQEGLYNELQKDKMAEAYSEIGMKGERRRGKGHDGLYQGLSTATKDTYDALHMQALPPR

SEQ ID NO: 206849 - protein, 489 aa, Artificial Sequence
  Description of Artificial Sequence: Synthetic Chimeric Antigen Receptor
MALPVTALLLPLALLLHAARPEVQLQQSGPELVKPGASVKISCKASGYTFTDYNMHWVKQSHGKSLEWIGYIYPYNGGTGYNQKFKSKATLTVDNSSSTAYMDVRSLTSEDSAVYYCARGRPAMDYWGQGTSVTVSSGGGGSGGGGSGGGGSDIVLTQSPASLAVSLGQRATISCRASESVDNYGISFMNWFQQKPGQPPKLLIYAASNQGSGVPARFSGSGSGTDFSLNIHPMEEDDTAMYFCQQSKEVPWTFGGGTKLEIKTTTPAPRPPTPAPTIASQPLSLRPEACRPAAGGAVHTRGLDFACDIISFFLALTSTALLFLLFFLTLRFSVVKRGRKKLLYIFKQPFMRPVQTTQEEDGCSCRFPEEEEGGCELRVKFSRSADAPAYQQGQNQLYNELNLGRREEYDVLDKRRGRDPEMGGKPRRKNPQEGLYNELQKDKMAEAYSEIGMKGERRRGKGHDGLYQGLSTATKDTYDALHMQALPPR

SEQ ID NO: 206850 - protein, 489 aa, Artificial Sequence
  Description of Artificial Sequence: Synthetic Chimeric Antigen Receptor
MALPVTALLLPLALLLHAARPEVQLVESGGGLVQPGGSLRLSCAASGFTFSSYAMSWVRQAPGKGLEWVSAISGSGGSTYYADSVKGRFTISRDNSKNTLYLQMNSLRAEDTAVYYCAKETDYYGSGTFDYWGQGTLVTVSSASGGGGSGGGGSGGGGSDIQMTQSPSSLSASVGDRVTISCRASQGIGIYLAWYQQRSGKPPQLLIHGASTLQSGVPSRFSGSGSGTDFTLTISSLQPEDFASYWCQQSNNFPPTFGQGTKVEIKTTTPAPRPPTPAPTIASQPLSLRPEACRPAAGGAVHTRGLDFACDIYIWAPLAGTCGVLLLSLVITLYCKRGRKKLLYIFKQPFMRPVQTTQEEDGCSCRFPEEEEGGCELRVKFSRSADAPAYKQGQNQLYNELNLGRREEYDVLDKRRGRDPEMGGKPRRKNPQEGLYNELQKDKMAEAYSEIGMKGERRRGKGHDGLYQGLSTATKDTYDALHMQALPPR

SEQ ID NO: 206851 - protein, 489 aa, Artificial Sequence
  Description of Artificial Sequence: Synthetic Chimeric Antigen Receptor
MALPVTALLLPLALLLHAARPQVQLVQSGAEVKKPGASVRVSCKASGYMFTDFFIHWVRQAPGQGLEWMGWINPNSGVTKYAQKFQGRVTMTRNTSISTAYMELSSLRSEDTAVYYCATWYSSGWYGIANIWGQGTMVTVSSASGGGGSGGGGSGGGGSDIQLTQSPSSLSASVGDRVTITCQASHDISNYLHWYQQKPGKAPKLLIYDASNLETGVPSRFTGSGSGTDFTLTIRSLQPEDVAAYYCQQSDDLPHTFGQGTKVDIKTTTPAPRPPTPAPTIASQPLSLRPEACRPAAGGAVHTRGLDFACDIYIWAPLAGTCGVLLLSLVITLYCKRGRKKLLYIFKQPFMRPVQTTQEEDGCSCRFPEEEEGGCELRVKFSRSADAPAYKQGQNQLYNELNLGRREEYDVLDKRRGRDPEMGGKPRRKNPQEGLYNELQKDKMAEAYSEIGMKGERRRGKGHDGLYQGLSTATKDTYDALHMQALPPR

SEQ ID NO: 206852 - protein, 490 aa, Artificial Sequence
  Description of Artificial Sequence: Synthetic Chimeric Antigen Receptor
MALPVTALLLPLALLLHAARPQVQLQQPGAEVVKPGASVKMSCKASGYTFTSYYIHWIKQTPGQGLEWVGVIYPGNDDISYNQKFKGKATLTADKSSTTAYMQLSSLTSEDSAVYYCAREVRLRYFDVWGAGTTVTVSSGGGGSGGGGSGGGGSNIMLTQSPSSLAVSAGEKVTMSCKSSQSVFFSSSQKNYLAWYQQIPGQSPKLLIYWASTRESGVPDRFTGSGSGTDFTLTISSVQSEDLAIYYCHQYLSSRTFGGGTKLEIKRTTTPAPRPPTPAPTIASQPLSLRPEACRPAAGGAVHTRGLDFACDIYIWAPLAGTCGVLLLSLVITLYCKRGRKKLLYIFKQPFMRPVQTTQEEDGCSCRFPEEEEGGCELRVKFSRSADAPAYQQGQNQLYNELNLGRREEYDVLDKRRGRDPEMGGKPRRKNPQEGLYNELQKDKMAEAYSEIGMKGERRRGKGHDGLYQGLSTATKDTYDALHMQALPPR

SEQ ID NO: 206853 - protein, 492 aa, Artificial Sequence
  Description of Artificial Sequence: Synthetic Chimeric Antigen Receptor
MALPVTALLLPLALLLHAARPQVQLVQSGGGVVQPGKSLRLSCAASGFTFSIFAMHWVRQAPGKGLEWVATISYDGSNAFYADSVEGRFTISRDNSKDSLYLQMDSLRPEDTAVYYCVKAGDGGYDVFDSWGQGTLVTVSSASGGGGSGGGGSGGGGSEIVMTQSPLSLPVTPGEPASISCRSSQSLLHSNGYNYLDWYLQKPGQSPQLLIYLGSNRASGVPDRFSGSGSGTDFTLKISRVEAEDVGVYYCMQALQTPTFGPGTKVDIKTTTPAPRPPTPAPTIASQPLSLRPEACRPAAGGAVHTRGLDFACDIYIWAPLAGTCGVLLLSLVITLYCKRGRKKLLYIFKQPFMRPVQTTQEEDGCSCRFPEEEEGGCELRVKFSRSADAPAYKQGQNQLYNELNLGRREEYDVLDKRRGRDPEMGGKPRRKNPQEGLYNELQKDKMAEAYSEIGMKGERRRGKGHDGLYQGLSTATKDTYDALHMQALPPR

SEQ ID NO: 206854 - protein, 493 aa, Artificial Sequence
  Description of Artificial Sequence: Synthetic Chimeric Antigen Receptor
MALPVTALLLPLALLLHAARPQVQLQQPGAEVVKPGASVKMSCKASGYTFTSYYIHWIKQTPGQGLEWVGVIYPGNDDISYNQKFKGKATLTADKSSTTAYMQLSSLTSEDSAVYYCAREVRLRYFDVWGAGTTVTVSSGGGGSGGGGSGGGGSNIMLTQSPSSLAVSAGEKVTMSCKSSQSVFFSSSQKNYLAWYQQIPGQSPKLLIYWASTRESGVPDRFTGSGSGTDFTLTISSVQSEDLAIYYCHQYLSSRTFGGGTKLEIKRTTTPAPRPPTPAPTIASQPLSLRPEACRPAAGGAVHTRGLDFACDIISFFLALTSTALLFLLFFLTLRFSVVKRGRKKLLYIFKQPFMRPVQTTQEEDGCSCRFPEEEEGGCELRVKFSRSADAPAYQQGQNQLYNELNLGRREEYDVLDKRRGRDPEMGGKPRRKNPQEGLYNELQKDKMAEAYSEIGMKGERRRGKGHDGLYQGLSTATKDTYDALHMQALPPR

SEQ ID NO: 206855 - protein, 493 aa, Artificial Sequence
  Description of Artificial Sequence: Synthetic Chimeric Antigen Receptor
MALPVTALLLPLALLLHAARPQVQLVQSGGGLVQPGGSLRLSCAASGFTFSSYAMSWVRQAPGKGLEWVSAISGSGGSTYYADSVKGRFTISRDNSKNTLYLQMNSLRAEDTAVYYCAKEDTIRGPNYYYYGMDVWGQGTTVTVSSASGGGGSGGGGSGGGGSETTLTQSPSSVSASVGDRVSITCRASQDIDTWLAWYQLKPGKAPKLLMYAASNLQGGVPSRFSGSGSGTDFILTISSLQPEDFATYYCQQASIFPPTFGGGTKVDIKTTTPAPRPPTPAPTIASQPLSLRPEACRPAAGGAVHTRGLDFACDIYIWAPLAGTCGVLLLSLVITLYCKRGRKKLLYIFKQPFMRPVQTTQEEDGCSCRFPEEEEGGCELRVKFSRSADAPAYKQGQNQLYNELNLGRREEYDVLDKRRGRDPEMGGKPRRKNPQEGLYNELQKDKMAEAYSEIGMKGERRRGKGHDGLYQGLSTATKDTYDALHMQALPPR

SEQ ID NO: 206856 - protein, 494 aa, Artificial Sequence
  Description of Artificial Sequence: Synthetic Chimeric Antigen Receptor
MALPVTALLLPLALLLHAARPEVKLQESGPELVKPGASVKMSCKASGYKFTDYVVHWLKQKPGQGLEWIGYINPYNDGTKYNEKFKGKATLTSDKSSSTAYMEVSSLTSEDSAVYYCARDYRYEVYGMDYWGQGTSVTVSSGGGGSGGGGSGGGGSDIVLTQSPTIMSASPGERVTMTCTASSSVNYIHWYQQKSGDSPLRWIFDTSKVASGVPARFSGSGSGTSYSLTISTMEAEDAATYYCQQWRSYPLTFGDGTRLELKRADAAPTVSTTTPAPRPPTPAPTIASQPLSLRPEACRPAAGGAVHTRGLDFACDIYIWAPLAGTCGVLLLSLVITLYCKRGRKKLLYIFKQPFMRPVQTTQEEDGCSCRFPEEEEGGCELRVKFSRSADAPAYQQGQNQLYNELNLGRREEYDVLDKRRGRDPEMGGKPRRKNPQEGLYNELQKDKMAEAYSEIGMKGERRRGKGHDGLYQGLSTATKDTYDALHMQALPPR

SEQ ID NO: 206857 - protein, 494 aa, Artificial Sequence
  Description of Artificial Sequence: Synthetic Chimeric Antigen Receptor
MALPVTALLLPLALLLHAARPQVQLVQSGAEVKKPGESLKISCKGSGYSFTSYWIGWVRQMPGKGLEWMGIIYPGDSDTRYSPSFQGQVTISADKSITTAYLQWSSLRASDSAMYYCARGGYSDYDYYFDFWGQGTLVTVSSASGGGGSGGGGSGGGGSEIVMTQSPLSLPVTPGEPASISCRSSQSLLHSNGYNYLDWYLQKPGQSPQLLIYLGSNRASGVPDRFSGSGSGTDFTLKISRVEAEDVGVYYCMQALQTPFTFGGGTKVEIKTTTPAPRPPTPAPTIASQPLSLRPEACRPAAGGAVHTRGLDFACDIYIWAPLAGTCGVLLLSLVITLYCKRGRKKLLYIFKQPFMRPVQTTQEEDGCSCRFPEEEEGGCELRVKFSRSADAPAYKQGQNQLYNELNLGRREEYDVLDKRRGRDPEMGGKPRRKNPQEGLYNELQKDKMAEAYSEIGMKGERRRGKGHDGLYQGLSTATKDTYDALHMQALPPR

SEQ ID NO: 206858 - protein, 495 aa, Artificial Sequence
  Description of Artificial Sequence: Synthetic Chimeric Antigen Receptor
MALPVTALLLPLALLLHAARPQVQLVQSGAEVKKPGASVRVSCKASGYIFTNYYVHWVRQAPGQGLEWMGIISPSGGSPTYAQRLQGRVTMTRDLSTSTVYMELSSLTSEDTAVYFCARESRLRGNRLGLQSSIFDHWGQGTLVTVSSASGGGGSGGGGSGGGGSDIRMTQSPPSLSASVGDRVTIPCQASQDINNHLNWYQQKPGKAPQLLIYDTSNLEIGVPSRFSGSGSGTDFTLTISSLQPEDIATYYCQQYENLPLTFGGGTKVEIKTTTPAPRPPTPAPTIASQPLSLRPEACRPAAGGAVHTRGLDFACDIYIWAPLAGTCGVLLLSLVITLYCKRGRKKLLYIFKQPFMRPVQTTQEEDGCSCRFPEEEEGGCELRVKFSRSADAPAYKQGQNQLYNELNLGRREEYDVLDKRRGRDPEMGGKPRRKNPQEGLYNELQKDKMAEAYSEIGMKGERRRGKGHDGLYQGLSTATKDTYDALHMQALPPR

SEQ ID NO: 206859 - protein, 497 aa, Artificial Sequence
  Description of Artificial Sequence: Synthetic Chimeric Antigen Receptor
MALPVTALLLPLALLLHAARPEVKLQESGPELVKPGASVKMSCKASGYKFTDYVVHWLKQKPGQGLEWIGYINPYNDGTKYNEKFKGKATLTSDKSSSTAYMEVSSLTSEDSAVYYCARDYRYEVYGMDYWGQGTSVTVSSGGGGSGGGGSGGGGSDIVLTQSPTIMSASPGERVTMTCTASSSVNYIHWYQQKSGDSPLRWIFDTSKVASGVPARFSGSGSGTSYSLTISTMEAEDAATYYCQQWRSYPLTFGDGTRLELKRADAAPTVSTTTPAPRPPTPAPTIASQPLSLRPEACRPAAGGAVHTRGLDFACDIISFFLALTSTALLFLLFFLTLRFSVVKRGRKKLLYIFKQPFMRPVQTTQEEDGCSCRFPEEEEGGCELRVKFSRSADAPAYQQGQNQLYNELNLGRREEYDVLDKRRGRDPEMGGKPRRKNPQEGLYNELQKDKMAEAYSEIGMKGERRRGKGHDGLYQGLSTATKDTYDALHMQALPPR

SEQ ID NO: 206860 - protein, 652 aa, Artificial Sequence
  Description of Artificial Sequence: Synthetic Chimeric Antigen Receptor
QVQLQQSGPELVRPGTFVKISCKASGYTFTNYDINWVNQRPGQGLEWIGWIYPGDGSTKYNEKFKAKATLTADKSSSTAYLQLNNLTSENSAVYFCASGYEDAMDYWGQGTSVTVSSGGGGSGGGGSGGGGSDIKMTQSPSSMYASLGERVIINCKASQDINSYLSWFQQKPGKSPKTLIYRANRLVDGVPSRFSGSGSGQDYSLTISSLEYEDMGIYYCLQYDEFPLTFGAGTKLELKREPKSPDKTHTCPPCPAPPVAGPSVFLFPPKPKDTLMIARTPEVTCVVVDVSHEDPEVKFNWYVDGVEVHNAKTKPREEQYNSTYRVVSVLTVLHQDWLNGKEYKCKVSNKALPAPIEKTISKAKGQPREPQVYTLPPSRDELTKNQVSLTCLVKGFYPSDIAVEWESNGQPENNYKTTPPVLDSDGSFFLYSKLTVDKSRWQQGNVFSCSVMHEALHNHYTQKSLSLSPGKIISFFLALTSTALLFLLFFLTLRFSVVKRGRKKLLYIFKQPFMRPVQTTQEEDGCSCRFPEEEEGGCELRVKFSRSADAPAYQQGQNQLYNELNLGRREEYDVLDKRRGRDPEMGGKPRRKNPQEGLYNELQKDKMAEAYSEIGMKGERRRGKGHDGLYQGLSTATKDTYDALHMQALPPR

SEQ ID NO: 206861 - protein, 670 aa, Artificial Sequence
  Description of Artificial Sequence: Synthetic Chimeric Antigen Receptor
MALPVTALLLPLALLLHAARPQVQLQQSGPELVRPGTFVKISCKASGYTFTNYDINWVNQRPGQGLEWIGWIYPGDGSTKYNEKFKAKATLTADKSSSTAYLQLNNLTSENSAVYFCASGYEDAMDYWGQGTSVTVSSGGGGSGGGGSGGGGSDIKMTQSPSSMYASLGERVIINCKASQDINSYLSWFQQKPGKSPKTLIYRANRLVDGVPSRFSGSGSGQDYSLTISSLEYEDMGIYYCLQYDEFPLTFGAGTKLELKREPKSPDKTHTCPPCPAPPVAGPSVFLFPPKPKDTLMIARTPEVTCVVVDVSHEDPEVKFNWYVDGVEVHNAKTKPREEQYNSTYRVVSVLTVLHQDWLNGKEYKCKVSNKALPAPIEKTISKAKGQPREPQVYTLPPSRDELTKNQVSLTCLVKGFYPSDIAVEWESNGQPENNYKTTPPVLDSDGSFFLYSKLTVDKSRWQQGNVFSCSVMHEALHNHYTQKSLSLSPGKIYIWAPLAGTCGVLLLSLVITLYCKRGRKKLLYIFKQPFMRPVQTTQEEDGCSCRFPEEEEGGCELRVKFSRSADAPAYQQGQNQLYNELNLGRREEYDVLDKRRGRDPEMGGKPRRKNPQEGLYNELQKDKMAEAYSEIGMKGERRRGKGHDGLYQGLSTATKDTYDALHMQALPPR

SEQ ID NO: 206862 - protein, 672 aa, Artificial Sequence
  Description of Artificial Sequence: Synthetic Chimeric Antigen Receptor
MALPVTALLLPLALLLHAARPEVQLQQSGPELVKPGASVKISCKASGYTFTDYNMHWVKQSHGKSLEWIGYIYPYNGGTGYNQKFKSKATLTVDNSSSTAYMDVRSLTSEDSAVYYCARGRPAMDYWGQGTSVTVSSGGGGSGGGGSGGGGSDIVLTQSPASLAVSLGQRATISCRASESVDNYGISFMNWFQQKPGQPPKLLIYAASNQGSGVPARFSGSGSGTDFSLNIHPMEEDDTAMYFCQQSKEVPWTFGGGTKLEIKEPKSPDKTHTCPPCPAPPVAGPSVFLFPPKPKDTLMIARTPEVTCVVVDVSHEDPEVKFNWYVDGVEVHNAKTKPREEQYNSTYRVVSVLTVLHQDWLNGKEYKCKVSNKALPAPIEKTISKAKGQPREPQVYTLPPSRDELTKNQVSLTCLVKGFYPSDIAVEWESNGQPENNYKTTPPVLDSDGSFFLYSKLTVDKSRWQQGNVFSCSVMHEALHNHYTQKSLSLSPGKIYIWAPLAGTCGVLLLSLVITLYCKRGRKKLLYIFKQPFMRPVQTTQEEDGCSCRFPEEEEGGCELRVKFSRSADAPAYQQGQNQLYNELNLGRREEYDVLDKRRGRDPEMGGKPRRKNPQEGLYNELQKDKMAEAYSEIGMKGERRRGKGHDGLYQGLSTATKDTYDALHMQALPPR

SEQ ID NO: 206863 - protein, 673 aa, Artificial Sequence
  Description of Artificial Sequence: Synthetic Chimeric Antigen Receptor
MALPVTALLLPLALLLHAARPQVQLQQSGPELVRPGTFVKISCKASGYTFTNYDINWVNQRPGQGLEWIGWIYPGDGSTKYNEKFKAKATLTADKSSSTAYLQLNNLTSENSAVYFCASGYEDAMDYWGQGTSVTVSSGGGGSGGGGSGGGGSDIKMTQSPSSMYASLGERVIINCKASQDINSYLSWFQQKPGKSPKTLIYRANRLVDGVPSRFSGSGSGQDYSLTISSLEYEDMGIYYCLQYDEFPLTFGAGTKLELKREPKSPDKTHTCPPCPAPPVAGPSVFLFPPKPKDTLMIARTPEVTCVVVDVSHEDPEVKFNWYVDGVEVHNAKTKPREEQYNSTYRVVSVLTVLHQDWLNGKEYKCKVSNKALPAPIEKTISKAKGQPREPQVYTLPPSRDELTKNQVSLTCLVKGFYPSDIAVEWESNGQPENNYKTTPPVLDSDGSFFLYSKLTVDKSRWQQGNVFSCSVMHEALHNHYTQKSLSLSPGKIISFFLALTSTALLFLLFFLTLRFSVVKRGRKKLLYIFKQPFMRPVQTTQEEDGCSCRFPEEEEGGCELRVKFSRSADAPAYQQGQNQLYNELNLGRREEYDVLDKRRGRDPEMGGKPRRKNPQEGLYNELQKDKMAEAYSEIGMKGERRRGKGHDGLYQGLSTATKDTYDALHMQALPPR

SEQ ID NO: 206864 - protein, 675 aa, Artificial Sequence
  Description of Artificial Sequence: Synthetic Chimeric Antigen Receptor
MALPVTALLLPLALLLHAARPEVQLQQSGPELVKPGASVKISCKASGYTFTDYNMHWVKQSHGKSLEWIGYIYPYNGGTGYNQKFKSKATLTVDNSSSTAYMDVRSLTSEDSAVYYCARGRPAMDYWGQGTSVTVSSGGGGSGGGGSGGGGSDIVLTQSPASLAVSLGQRATISCRASESVDNYGISFMNWFQQKPGQPPKLLIYAASNQGSGVPARFSGSGSGTDFSLNIHPMEEDDTAMYFCQQSKEVPWTFGGGTKLEIKEPKSPDKTHTCPPCPAPPVAGPSVFLFPPKPKDTLMIARTPEVTCVVVDVSHEDPEVKFNWYVDGVEVHNAKTKPREEQYNSTYRVVSVLTVLHQDWLNGKEYKCKVSNKALPAPIEKTISKAKGQPREPQVYTLPPSRDELTKNQVSLTCLVKGFYPSDIAVEWESNGQPENNYKTTPPVLDSDGSFFLYSKLTVDKSRWQQGNVFSCSVMHEALHNHYTQKSLSLSPGKIISFFLALTSTALLFLLFFLTLRFSVVKRGRKKLLYIFKQPFMRPVQTTQEEDGCSCRFPEEEEGGCELRVKFSRSADAPAYQQGQNQLYNELNLGRREEYDVLDKRRGRDPEMGGKPRRKNPQEGLYNELQKDKMAEAYSEIGMKGERRRGKGHDGLYQGLSTATKDTYDALHMQALPPR

SEQ ID NO: 206865 - protein, 676 aa, Artificial Sequence
  Description of Artificial Sequence: Synthetic Chimeric Antigen Receptor
MALPVTALLLPLALLLHAARPQVQLQQPGAEVVKPGASVKMSCKASGYTFTSYYIHWIKQTPGQGLEWVGVIYPGNDDISYNQKFKGKATLTADKSSTTAYMQLSSLTSEDSAVYYCAREVRLRYFDVWGAGTTVTVSSGGGGSGGGGSGGGGSNIMLTQSPSSLAVSAGEKVTMSCKSSQSVFFSSSQKNYLAWYQQIPGQSPKLLIYWASTRESGVPDRFTGSGSGTDFTLTISSVQSEDLAIYYCHQYLSSRTFGGGTKLEIKREPKSPDKTHTCPPCPAPPVAGPSVFLFPPKPKDTLMIARTPEVTCVVVDVSHEDPEVKFNWYVDGVEVHNAKTKPREEQYNSTYRVVSVLTVLHQDWLNGKEYKCKVSNKALPAPIEKTISKAKGQPREPQVYTLPPSRDELTKNQVSLTCLVKGFYPSDIAVEWESNGQPENNYKTTPPVLDSDGSFFLYSKLTVDKSRWQQGNVFSCSVMHEALHNHYTQKSLSLSPGKIYIWAPLAGTCGVLLLSLVITLYCKRGRKKLLYIFKQPFMRPVQTTQEEDGCSCRFPEEEEGGCELRVKFSRSADAPAYQQGQNQLYNELNLGRREEYDVLDKRRGRDPEMGGKPRRKNPQEGLYNELQKDKMAEAYSEIGMKGERRRGKGHDGLYQGLSTATKDTYDALHMQALPPR

SEQ ID NO: 206866 - protein, 679 aa, Artificial Sequence
  Description of Artificial Sequence: Synthetic Chimeric Antigen Receptor
MALPVTALLLPLALLLHAARPQVQLQQPGAEVVKPGASVKMSCKASGYTFTSYYIHWIKQTPGQGLEWVGVIYPGNDDISYNQKFKGKATLTADKSSTTAYMQLSSLTSEDSAVYYCAREVRLRYFDVWGAGTTVTVSSGGGGSGGGGSGGGGSNIMLTQSPSSLAVSAGEKVTMSCKSSQSVFFSSSQKNYLAWYQQIPGQSPKLLIYWASTRESGVPDRFTGSGSGTDFTLTISSVQSEDLAIYYCHQYLSSRTFGGGTKLEIKREPKSPDKTHTCPPCPAPPVAGPSVFLFPPKPKDTLMIARTPEVTCVVVDVSHEDPEVKFNWYVDGVEVHNAKTKPREEQYNSTYRVVSVLTVLHQDWLNGKEYKCKVSNKALPAPIEKTISKAKGQPREPQVYTLPPSRDELTKNQVSLTCLVKGFYPSDIAVEWESNGQPENNYKTTPPVLDSDGSFFLYSKLTVDKSRWQQGNVFSCSVMHEALHNHYTQKSLSLSPGKIISFFLALTSTALLFLLFFLTLRFSVVKRGRKKLLYIFKQPFMRPVQTTQEEDGCSCRFPEEEEGGCELRVKFSRSADAPAYQQGQNQLYNELNLGRREEYDVLDKRRGRDPEMGGKPRRKNPQEGLYNELQKDKMAEAYSEIGMKGERRRGKGHDGLYQGLSTATKDTYDALHMQALPPR

SEQ ID NO: 206867 - protein, 680 aa, Artificial Sequence
  Description of Artificial Sequence: Synthetic Chimeric Antigen Receptor
MALPVTALLLPLALLLHAARPEVKLQESGPELVKPGASVKMSCKASGYKFTDYVVHWLKQKPGQGLEWIGYINPYNDGTKYNEKFKGKATLTSDKSSSTAYMEVSSLTSEDSAVYYCARDYRYEVYGMDYWGQGTSVTVSSGGGGSGGGGSGGGGSDIVLTQSPTIMSASPGERVTMTCTASSSVNYIHWYQQKSGDSPLRWIFDTSKVASGVPARFSGSGSGTSYSLTISTMEAEDAATYYCQQWRSYPLTFGDGTRLELKRADAAPTVSEPKSPDKTHTCPPCPAPPVAGPSVFLFPPKPKDTLMIARTPEVTCVVVDVSHEDPEVKFNWYVDGVEVHNAKTKPREEQYNSTYRVVSVLTVLHQDWLNGKEYKCKVSNKALPAPIEKTISKAKGQPREPQVYTLPPSRDELTKNQVSLTCLVKGFYPSDIAVEWESNGQPENNYKTTPPVLDSDGSFFLYSKLTVDKSRWQQGNVFSCSVMHEALHNHYTQKSLSLSPGKIYIWAPLAGTCGVLLLSLVITLYCKRGRKKLLYIFKQPFMRPVQTTQEEDGCSCRFPEEEEGGCELRVKFSRSADAPAYQQGQNQLYNELNLGRREEYDVLDKRRGRDPEMGGKPRRKNPQEGLYNELQKDKMAEAYSEIGMKGERRRGKGHDGLYQGLSTATKDTYDALHMQALPPR

SEQ ID NO: 206868 - protein, 683 aa, Artificial Sequence
  Description of Artificial Sequence: Synthetic Chimeric Antigen Receptor
MALPVTALLLPLALLLHAARPEVKLQESGPELVKPGASVKMSCKASGYKFTDYVVHWLKQKPGQGLEWIGYINPYNDGTKYNEKFKGKATLTSDKSSSTAYMEVSSLTSEDSAVYYCARDYRYEVYGMDYWGQGTSVTVSSGGGGSGGGGSGGGGSDIVLTQSPTIMSASPGERVTMTCTASSSVNYIHWYQQKSGDSPLRWIFDTSKVASGVPARFSGSGSGTSYSLTISTMEAEDAATYYCQQWRSYPLTFGDGTRLELKRADAAPTVSEPKSPDKTHTCPPCPAPPVAGPSVFLFPPKPKDTLMIARTPEVTCVVVDVSHEDPEVKFNWYVDGVEVHNAKTKPREEQYNSTYRVVSVLTVLHQDWLNGKEYKCKVSNKALPAPIEKTISKAKGQPREPQVYTLPPSRDELTKNQVSLTCLVKGFYPSDIAVEWESNGQPENNYKTTPPVLDSDGSFFLYSKLTVDKSRWQQGNVFSCSVMHEALHNHYTQKSLSLSPGKIISFFLALTSTALLFLLFFLTLRFSVVKRGRKKLLYIFKQPFMRPVQTTQEEDGCSCRFPEEEEGGCELRVKFSRSADAPAYQQGQNQLYNELNLGRREEYDVLDKRRGRDPEMGGKPRRKNPQEGLYNELQKDKMAEAYSEIGMKGERRRGKGHDGLYQGLSTATKDTYDALHMQALPPR

SEQ ID NO: 206869 - protein, 464 aa, Artificial Sequence
  Description of Artificial Sequence: Synthetic Chimeric Antigen Receptor
MALPVTALLLPLALLLHAARPQIQLVQSGPELKKPGETVKISCKASGYTFTKYGMNWVKQTPGKGLKWMGWINTNSGEPTYAEEFKGRFAFSLETSASTAYLQINNLKNEDTATYFCARGAYYRYDGEVSYYAMDYWGQGTSVTVSSGGGGSGGGGSGGGGSQIILTQSPAIMSASLGERVTMTCTATSSLSSSYLHWYQQKPGSSPKLWIYSTSHLASGVPARFSGGGSGTSYSLTISSMEAEDAATYYCHQYHLSPYTFGGGTKLEIKGLAVSTISSFFPPGYQIYIWAPLAGTCGVLLLSLVITLYCKRGRKKLLYIFKQPFMRPVQTTQEEDGCSCRFPEEEEGGCELRVKFSRSADAPAYQQGQNQLYNELNLGRREEYDVLDKRRGRDPEMGGKPRRKNPQEGLYNELQKDKMAEAYSEIGMKGERRRGKGHDGLYQGLSTATKDTYDALHMQALPPR

SEQ ID NO: 206870 - protein, 471 aa, Artificial Sequence
  Description of Artificial Sequence: Synthetic Chimeric Antigen Receptor
PLALLLHAARPEVQLLESGGGLVQPGGSLRLSCAVSGFTFNSFAMSWVRQAPGKGLEWVSAISGSGGGTYYADSVKGRFTISRDNSKNTLYLQMNSLRAEDTAVYFCAKDKILWFGEPVFDYWGQGTLVTVSSASGGGGSGGGGSGGGGSEIVLTQSPATLSLSPGERATLSCRASQSVSSYLAWYQQKPGQAPRLLIYDASNRATGIPARFSGSGSGTDFTLTISSLEPEDFAVYYCQQRSNWPPTFGQGTKVEIKTTTPAPRPPTPAPTIASQPLSLRPEACRPAAGGAVHTRGLDFACDIYIWAPLAGTCGVLLLSLVITLYCKRGRKKLLYIFKQPFMRPVQTTQEEDGCSCRFPEEEEGGCELRVKFSRSADAPAYQQGQNQLYNELNLGRREEYDVLDKRRGRDPEMGGKPRRKNPQEGLYNELQKDKMAEAYSEIGMKGERRRGKGHDGLYQGLSTATKDTYDA

SEQ ID NO: 206871 - protein, 472 aa, Artificial Sequence
  Description of Artificial Sequence: Synthetic Chimeric Antigen Receptor
MALPVTALLLPLALLLHAARPPLALLLHAARPEVQLQQSGAELVRPGASVKLSCTASGFNIKDSLIHWVKQRPEQGLEWIGWIDPEDDKTKYAPKFQDKATLTADTSSNTAYLQLSTLTSEDTAIYYCVSRYINYYFAYWGQGTTLTVSSGGGGSGGGGSGGGGSDIVMTQSPSSLTVTAGEKVTMSCKSSQSLLHSGNQRNYLTWYQQKPGQPPKLLIYWASTRESGVPDRFTGSGSGTDFTLTISSVQAEDLAVYYCQNDYDYPYTFGGGTKLEIKGLAVSTISSFFPPGYQIYIWAPLAGTCGVLLLSLVITLYCKRGRKKLLYIFKQPFMRPVQTTQEEDGCSCRFPEEEEGGCELRVKFSRSADAPAYQQGQNQLYNELNLGRREEYDVLDKRRGRDPEMGGKPRRKNPQEGLYNELQKDKMAEAYSEIGMKGERRRGKGHDGLYQGLSTATKDTYDALHMQALPPR

SEQ ID NO: 206872 - protein, 488 aa, Artificial Sequence
  Description of Artificial Sequence: Synthetic Chimeric Antigen Receptor
MALPVTALLLPLALLLHAARPQIQLVQSGPEVKKPGETVKISCKASGYTFTNYGMNWVKQAPGKGLKWMGINTYTGEPTYADAFKGRFAFSLETSASTAYLQINNLKNEDTATYFCARDYGDYGMDYWGQGTSVTVSSGGGGSGGGGSGGGGSDIVLTQSPASLAVSLGQRATISCRASKSVSTSGYSFMHWYQQKPGQPPKLLIYLASNLESGVPARFSGSGSGTDFTLNIHPVEEEDAATYYCQHSREVPWTFGGGTKLEIKRTTTPAPRPPTPAPTIASQPLSLRPEACRPAAGGAVHTRGLDFACDIYIWAPLAGTCGVLLLSLVITLYCKRGRKKLLYIFKQPFMRPVQTTQEEDGCSCRFPEEEEGGCELRVKFSRSADAPAYQQGQNQLYNELNLGRREEYDVLDKRRGRDPEMGGKPRRKNPQEGLYNELQKDKMAEAYSEIGMKGERRRGKGHDGLYQGLSTATKDTYDALHMQALPPR

SEQ ID NO: 206873 - protein, 490 aa, Artificial Sequence
  Description of Artificial Sequence: Synthetic Chimeric Antigen Receptor
MALPVTALLLPLALLLHAARPEVQLQQSGAELVRPGASVKLSCTASGFNIKDSLIHWVKQRPEQGLEWIGWIDPEDDKTKYAPKFQDKATLTADTSSNTAYLQLSTLTSEDTAIYYCVSRYINYYFAYWGQGTTLTVSSGGGGSGGGGSGGGGSDIVMTQSPSSLTVTAGEKVTMSCKSSQSLLHSGNQRNYLTWYQQKPGQPPKLLIYWASTRESGVPDRFTGSGSGTDFTLTISSVQAEDLAVYYCQNDYDYPYTFGGGTKLEIKTTTPAPRPPTPAPTIASQPLSLRPEACRPAAGGAVHTRGLDFACDIYIWAPLAGTCGVLLLSLVITLYCKRGRKKLLYIFKQPFMRPVQTTQEEDGCSCRFPEEEEGGCELRVKFSRSADAPAYQQGQNQLYNELNLGRREEYDVLDKRRGRDPEMGGKPRRKNPQEGLYNELQKDKMAEAYSEIGMKGERRRGKGHDGLYQGLSTATKDTYDALHMQALPPR

SEQ ID NO: 206874 - protein, 491 aa, Artificial Sequence
  Description of Artificial Sequence: Synthetic Chimeric Antigen Receptor
MALPVTALLLPLALLLHAARPQAYLQQSGAELVRSGASVKMSCKASGYTFTSYNLHWVKQTPGQGLEWIGYIYPGNGGTNYNQKFKGKATLTADTSSSTAYMQISSLTSEDSAVYFCARGGIYYYGSSLDYWGQGTTLTVSSGGGGSGGGGSGGGGSNIVLTQSPASLAVSLGQRATISCRASESVDNYGTTFMYWYQQKPGQPPKLLIYLASNLESGVPARFSGSGSGTDFTLTIDPVEADDAATYYCQQNKEDPWTFGGGTKLEIKTTTPAPRPPTPAPTIASQPLSLRPEACRPAAGGAVHTRGLDFACDIYIWAPLAGTCGVLLLSLVITLYCKRGRKKLLYIFKQPFMRPVQTTQEEDGCSCRFPEEEEGGCELRVKFSRSADAPAYQQGQNQLYNELNLGRREEYDVLDKRRGRDPEMGGKPRRKNPQEGLYNELQKDKMAEAYSEIGMKGERRRGKGHDGLYQGLSTATKDTYDALHMQALPPR

SEQ ID NO: 206875 - protein, 493 aa, Artificial Sequence
  Description of Artificial Sequence: Synthetic Chimeric Antigen Receptor
MALPVTALLLPLALLLHAARPQIQLVQSGPELKKPGETVKISCKASGYTFTKYGMNWVKQTPGKGLKWMGWINTNSGEPTYAEEFKGRFAFSLETSASTAYLQINNLKNEDTATYFCARGAYYRYDGEVSYYAMDYWGQGTSVTVSSGGGGSGGGGSGGGGSQIILTQSPAIMSASLGERVTMTCTATSSLSSSYLHWYQQKPGSSPKLWIYSTSHLASGVPARFSGGGSGTSYSLTISSMEAEDAATYYCHQYHLSPYTFGGGTKLEIKTTTPAPRPPTPAPTIASQPLSLRPEACRPAAGGAVHTRGLDFACDIYIWAPLAGTCGVLLLSLVITLYCKRGRKKLLYIFKQPFMRPVQTTQEEDGCSCRFPEEEEGGCELRVKFSRSADAPAYQQGQNQLYNELNLGRREEYDVLDKRRGRDPEMGGKPRRKNPQEGLYNELQKDKMAEAYSEIGMKGERRRGKGHDGLYQGLSTATKDTYDALHMQALPPR

SEQ ID NO: 206876 - protein, 535 aa, Artificial Sequence
  Description of Artificial Sequence: Synthetic Chimeric Antigen Receptor
MALPVTALLLPLALLLHAARPDIVMTQSPDSLAVSLGERVTMNCKSSQSLLYSTNQKNYLAWYQQKPGQSPKLLIYWASTRESGVPDRFSGSGSGTDFTLTISSVQAEDVAVYYCQQYYSYRTFGGGTKLEIKGGGGSGGGGSGGGGSQVQLQQSGPEVVKPGASVKMSCKASGYTFTSYVIHWVRQKPGQGLDWIGYINPYNDGTDYDEKFKGKATLTSDTSTSTAYMELSSLRSEDTAVYYCAREKDNYATGAWFAYWGQGTLVTVSSTTTPAPRPPTPAPTIASQPLSLRPEACRPAAGGAVHTRGLDFACDIYIWAPLAGTCGVLLLSLVITLYCRSKRSRLLHSDYMNMTPRRPGPTRKHYQPYAPPRDFAAYRSKRGRKKLLYIFKQPFMRPVQTTQEEDGCSCRFPEEEEGGCELRVKFSRSADAPAYQQGQNQLYNELNLGRREEYDVLDKRRGRDPEMGGKPQRRKNPQEGLYNELQKDKMAEAYSEIGMKGERRRGKGHDGLYQGLSTATKDTYDALHMQALPPR

SEQ ID NO: 206877 - protein, 657 aa, Artificial Sequence [sequence omitted]

SEQ ID NO: 206878 - protein, 676 aa, Artificial Sequence
  Description of Artificial Sequence: Synthetic Chimeric Antigen Receptor
MALPVTALLLPLALLLHAARPEVQLQQSGAELVRPGASVKLSCTASGFNIKDSLIHWVKQRPEQGLEWIGWIDPEDDKTKYAPKFQDKATLTADTSSNTAYLQLSTLTSEDTAIYYCVSRYINYYFAYWGQGTTLTVSSGGGGSGGGGSGGGGSDIVMTQSPSSLTVTAGEKVTMSCKSSQSLLHSGNQRNYLTWYQQKPGQPPKLLIYWASTRESGVPDRFTGSGSGTDFTLTISSVQAEDLAVYYCQNDYDYPYTFGGGTKLEIKEPKSPDKTHTCPPCPAPPVAGPSVFLFPPKPKDTLMIARTPEVTCVVVDVSHEDPEVKFNWYVDGVEVHNAKTKPREEQYNSTYRVVSVLTVLHQDWLNGKEYKCKVSNKALPAPIEKTISKAKGQPREPQVYTLPPSRDELTKNQVSLTCLVKGFYPSDIAVEWESNGQPENNYKTTPPVLDSDGSFFLYSKLTVDKSRWQQGNVFSCSVMHEALHNHYTQKSLSLSPGKIYIWAPLAGTCGVLLLSLVITLYCKRGRKKLLYIFKQPFMRPVQTTQEEDGCSCRFPEEEEGGCELRVKFSRSADAPAYQQGQNQLYNELNLGRREEYDVLDKRRGRDPEMGGKPRRKNPQEGLYNELQKDKMAEAYSEIGMKGERRRGKGHDGLYQGLSTATKDTYDALHMQALPPR

SEQ ID NO: 206879 - protein, 677 aa, Artificial Sequence
  Description of Artificial Sequence: Synthetic Chimeric Antigen Receptor
MALPVTALLLPLALLLHAARPQAYLQQSGAELVRSGASVKMSCKASGYTFTSYNLHWVKQTPGQGLEWIGYIYPGNGGTNYNQKFKGKATLTADTSSSTAYMQISSLTSEDSAVYFCARGGIYYYGSSLDYWGQGTTLTVSSGGGGSGGGGSGGGGSNIVLTQSPASLAVSLGQRATISCRASESVDNYGTTFMYWYQQKPGQPPKLLIYLASNLESGVPARFSGSGSGTDFTLTIDPVEADDAATYYCQQNKEDPWTFGGGTKLEIKEPKSPDKTHTCPPCPAPPVAGPSVFLFPPKPKDTLMIARTPEVTCVVVDVSHEDPEVKFNWYVDGVEVHNAKTKPREEQYNSTYRVVSVLTVLHQDWLNGKEYKCKVSNKALPAPIEKTISKAKGQPREPQVYTLPPSRDELTKNQVSLTCLVKGFYPSDIAVEWESNGQPENNYKTTPPVLDSDGSFFLYSKLTVDKSRWQQGNVFSCSVMHEALHNHYTQKSLSLSPGKIYIWAPLAGTCGVLLLSLVITLYCKRGRKKLLYIFKQPFMRPVQTTQEEDGCSCRFPEEEEGGCELRVKFSRSADAPAYQQGQNQLYNELNLGRREEYDVLDKRRGRDPEMGGKPRRKNPQEGLYNELQKDKMAEAYSEIGMKGERRRGKGHDGLYQGLSTATKDTYDALHMQALPPR

SEQ ID NO: 206880 - protein, 679 aa, Artificial Sequence
  Description of Artificial Sequence: Synthetic Chimeric Antigen Receptor
MALPVTALLLPLALLLHAARPQIQLVQSGPELKKPGETVKISCKASGYTFTKYGMNWVKQTPGKGLKWMGWINTNSGEPTYAEEFKGRFAFSLETSASTAYLQINNLKNEDTATYFCARGAYYRYDGEVSYYAMDYWGQGTSVTVSSGGGGSGGGGSGGGGSQIILTQSPAIMSASLGERVTMTCTATSSLSSSYLHWYQQKPGSSPKLWIYSTSHLASGVPARFSGGGSGTSYSLTISSMEAEDAATYYCHQYHLSPYTFGGGTKLEIKEPKSPDKTHTCPPCPAPPVAGPSVFLFPPKPKDTLMIARTPEVTCVVVDVSHEDPEVKFNWYVDGVEVHNAKTKPREEQYNSTYRVVSVLTVLHQDWLNGKEYKCKVSNKALPAPIEKTISKAKGQPREPQVYTLPPSRDELTKNQVSLTCLVKGFYPSDIAVEWESNGQPENNYKTTPPVLDSDGSFFLYSKLTVDKSRWQQGNVFSCSVMHEALHNHYTQKSLSLSPGKIYIWAPLAGTCGVLLLSLVITLYCKRGRKKLLYIFKQPFMRPVQTTQEEDGCSCRFPEEEEGGCELRVKFSRSADAPAYQQGQNQLYNELNLGRREEYDVLDKRRGRDPEMGGKPRRKNPQEGLYNELQKDKMAEAYSEIGMKGERRRGKGHDGLYQGLSTATKDTYDALHMQALPPR

SEQ ID NO: 206881 - protein, 536 aa, Artificial Sequence
  Description of Artificial Sequence: Synthetic Chimeric Antigen Receptor
MALPVTALLLPLALLLHAARPDIVMTQSPDSLAVSLGERATINCRASKSVSTSGYSYIYWYQQKPGQPPKLLIYLASILESGVPDRFSGSGSGTDFTLTISSLQAEDVAVYYCQHSRELPWTFGQGTKVEIKGGGGSGGGGSGGGGSEEQLVESGGGLVKPGGSLRLSCAASGFSFSDCRMYWLRQAPGKGLEWIGVISVKSENYGANYAESVRGRFTISRDDSKNTVYLQMNSLKTEDTAVYYCSASYYRYDVGAWFAYWGQGTLVTVSSTTTPAPRPPTPAPTIASQPLSLRPEACRPAAGGAVHTRGLDFACDIYIWAPLAGTCGVLLLSLVITLYCRSKRSRLLHSDYMNMTPRRPGPTRKHYQPYAPPRDFAAYRSKRGRKKLLYIFKQPFMRPVQTTQEEDGCSCRFPEEEEGGCELRVKFSRSADAPAYQQGQNQLYNELNLGRREEYDVLDKRRGRDPEMGGKPQRRKNPQEGLYNELQKDKMAEAYSEIGMKGERRRGKGHDGLYQGLSTATKDTYDALHMQALPPR

SEQ ID NO: 206882 - protein, 692 aa, Artificial Sequence
  Description of Artificial Sequence: Synthetic Chimeric Antigen Receptor
MVRGVPFRHLLLVLQLALLPAATQGKKVVLGKKGDTVELTCTASQKKSIQFHWKNSNQIKILGNQGSFLTKGPSKLNDRADSRRSLWDQGNFPLIIKNLKIEDSDTYICEVEDQKEEVQLLVFGLTANSDTHLLQGQSLTLTLESPPGSSPSVQCRSPRGKNIQGGKTLSVSQLELQDSGTWTCTVLQNQKKVEFKIDIVVLAFQKASGGGGSGGGGSQVQLLESGAEVKKPGSSVKVSCKASGDTFIRYSFTWVRQAPGQGLEWMGRIITILDVAHYAPHLQGRVTITADKSTSTVYLELRNLRSDDTAVYFCAGVYEGEADEGEYDNNGFLKHWGQGTLVTVTSGGGGSGGGGSGGGGSELELTQSPATLSVSPGERATLSCRASESVSSDLAWYQQKPGQAPRLLIYGASTRATGVPARFSGSGSGAEFTLTISSLQSEDFAVYYCQQYNNWPPRYTFGQGTRLEIKAAAIEVMYPPPYLDNEKSNGTIIHVKGKHLCPSPLFPGPSKPFWVLVVVGGVLACYSLLVTVAFIIFWVRSKRSRLLHSDYMNMTPRRPGPTRKHYQPYAPPRDFAAYRSRVKFSRSADAPAYQQGQNQLYNELNLGRREEYDVLDKRRGRDPEMGGKPRRKNPQEGLYNELQKDKMAEAYSEIGMKGERRRGKGHDGLYQGLSTATKDTYDALHMQALPPR

SEQ ID NO: 206883 - protein, 717 aa, Artificial Sequence [sequence omitted]

SEQ ID NO: 206884 - protein, 669 aa, Artificial Sequence
  Description of Artificial Sequence: Synthetic Chimeric Antigen Receptor
MEAPAQLLFLLLLWLPDTTGEIVLTQSPATLSLSPGERATLSCSASSSINYIYWLQQKPGQAPRILIYLTSNLASGVPARFSGSGSGTDFTLTISSLEPEDFAVYYCLQWSSNPLTFGGGTKVEIKRGGGGSGGGGSGGGGSGGGGSEVQLVESGGGLVKPGGSLRLSCAASGFTFSSYDMSWVRQAPGKGLEWVSTISSGGSYTYYLDSIKGRFTISRDNAKNSLYLQMNSLRAEDTAVYYCARQGLDYWGRGTLVTVSSGDPKEACPTGLYTHSGECCKACNLGEGVAQPCGANQTVCEPCLDSVTFSDVVSATEPCKPCTECVGLQSMSAPCVEADDAVCRCAYGYYQDETTGRCEACRVCEAGSGLVFSCQDKQNTVCEECPDGTYSDEANHVDPCLPCTVCEDTERQLRECTRWADAECEEIPGRWITRSTPPEGSDSTAPSTQEPEAPPEQDLIASTVAGVVTTVMGSSQPVVTRGTTDNPKFWVLVVVGGVLACYSLLVTVAFIIFWVRSKRSRLLHSDYMNMTPRRPGPTRKHYQPYAPPRDFAAYRSRVKFSRSADAPAYQQGQNQLYNELNLGRREEYDVLDKRRGRDPEMGGKPQRRKNPQEGLYNELQKDKMAEAYSEIGMKGERRRGKGHDGLYQGLSTATKDTYDALHMQALPPR

SEQ ID NO: 206885 - protein, 251 aa, Artificial Sequence
  Description of Artificial Sequence: Synthetic Chimeric Antigen Receptor
MEAPAQLLFLLLLWLPDTTGEIVLTQSPATLSLSPGERATLSCSASSSINYIYWLQQKPGQAPRILIYLTSNLASGVPARFSGSGSGTDFTLTISSLEPEDFAVYYCLQWSSNPLTFGGGTKVEIKRGGGGSGGGGSEVQLVESGGGLVKPGGSLRLSCAASGFTFSSYDMSWVRQAPGKGLEWVSTISSGGSYTYYLDSIKGRFTISRDNAKNSLYLQMNSLRAEDTAVYYCARQGLDYWGRGTLVTVSS

SEQ ID NO: 206886 - protein, 576 aa, Artificial Sequence
  Description of Artificial Sequence: Synthetic Chimeric Antigen Receptor
MEAPAQLLFLLLLWLPDTTGEIVLTQSPATLSLSPGERATLSCSASSSINYIYWLQQKPGQAPRILIYLTSNLASGVPARFSGSGSGTDFTLTISSLEPEDFAVYYCLQWSSNPLTFGGGTKVEIKRGGGGSGGGGSEVQLVESGGGLVKPGGSLRLSCAASGFTFSSYDMSWVRQAPGKGLEWVSTISSGGSYTYYLDSIKGRFTISRDNAKNSLYLQMNSLRAEDTAVYYCARQGLDYWGRGTLVTVSSGDPKEACPTGLYTHSGECCKACNLGEGVAQPCGANQTVCEPCLDSVTFSDVVSATEPCKPCTECVGLQSMSAPCVEADDAVCRCAYGYYQDETTGRCEACRVCEAGSGLVFSCQDKQNTVCEECPDGTYSDEAARAADAECEEPKFWVLVVVGGVLACYSLLVTVAFIIFWVRSKRSRLLHSDYMNMTPRRPGPTRKHYQPYAPPRDFAAYRSRVKFSRSADAPAYQQGQNQLYNELNLGRREEYDVLDKRRGRDPEMGGKPRRKNPQEGLYNELQKDKMAEAYSEIGMKGERRRGKGHDGLYQGLSTATKDTYDALHMQALPPR

SEQ ID NO: 206887 - protein, 586 aa, Artificial Sequence
  Description of Artificial Sequence: Synthetic Chimeric Antigen Receptor
MEAPAQLLFLLLLWLPDTTGEIVLTQSPATLSLSPGERATLSCSASSSINYIYWLQQKPGQAPRILIYLTSNLASGVPARFSGSGSGTDFTLTISSLEPEDFAVYYCLQWSSNPLTFGGGTKVEIKRGGGGSGGGGSGGGGSGGGGSEVQLVESGGGLVKPGGSLRLSCAASGFTFSSYDMSWVRQAPGKGLEWVSTISSGGSYTYYLDSIKGRFTISRDNAKNSLYLQMNSLRAEDTAVYYCARQGLDYWGRGTLVTVSSGDPKEACPTGLYTHSGECCKACNLGEGVAQPCGANQTVCEPCLDSVTFSDVVSATEPCKPCTECVGLQSMSAPCVEADDAVCRCAYGYYQDETTGRCEACRVCEAGSGLVFSCQDKQNTVCEECPDGTYSDEAARAADAECEEPKFWVLVVVGGVLACYSLLVTVAFIIFWVRSKRSRLLHSDYMNMTPRRPGPTRKHYQPYAPPRDFAAYRSRVKFSRSADAPAYQQGQNQLYNELNLGRREEYDVLDKRRGRDPEMGGKPRRKNPQEGLYNELQKDKMAEAYSEIGMKGERRRGKGHDGLYQGLSTATKDTYDALHMQALPPR

SEQ ID NO: 206888 - protein, 587 aa, Artificial Sequence
  Description of Artificial Sequence: Synthetic Chimeric Antigen Receptor
MEAPAQLLFLLLLWLPDTTGEIVLTQSPATLSLSPGERATLSCSASSSINYIYWLQQKPGQAPRILIYLTSNLASGVPARFSGSGSGTDFTLTISSLEPEDFAVYYCLQWSSNPLTFGGGTKVEIKRGGGGSGGGGSGGGGSGGGGSEVQLVESGGGLVKPGGSLRLSCAASGFTFSSYDMSWVRQAPGKGLEWVSTISSGGSYTYYLDSIKGRFTISRDNAKNSLYLQMNSLRAEDTAVYYCARQGLDYWGRGTLVTVSSGDPKEACPTGLYTHSGECCKACNLGEGVAQPCGANQTVCEPCLDSVTFSDVVSATEPCKPCTECVGLQSMSAPCVEADDAVCRCAYGYYQDETTGRCEACRVCEAGSGLVFSCQDKQNTVCEECPDGTYSDEAARAADAECEEPKFWVLVVVGGVLACYSLLVTVAFIIFWVRSKRSRLLHSDYMNMTPRRPGPTRKHYQPYAPPRDFAAYRSRVKFSRSADAPAYQQGQNQLYNELNLGRREEYDVLDKRRGRDPEMGGKPQRRKNPQEGLYNELQKDKMAEAYSEIGMKGERRRGKGHDGLYQGLSTATKDTYDALHMQALPPR

SEQ ID NO: 206889 - protein, 598 aa, Artificial Sequence
  Description of Artificial Sequence: Synthetic Chimeric Antigen Receptor
MEAPAQLLFLLLLWLPDTTGEIVLTQSPATLSLSPGERATLSCSASSSINYIYWLQQKPGQAPRILIYLTSNLASGVPARFSGSGSGTDFTLTISSLEPEDFAVYYCLQWSSNPLTFGGGTKVEIKRGGGGSGGGGSEVQLVESGGGLVKPGGSLRLSCAASGFTFSSYDMSWVRQAPGKGLEWVSTISSGGSYTYYLDSIKGRFTISRDNAKNSLYLQMNSLRAEDTAVYYCARQGLDYWGRGTLVTVSSGDPKEACPTGLYTHSGECCKACNLGEGVAQPCGANQTVCEPCLDSVTFSDVVSATEPCKPCTECVGLQSMSAPCVEADDAVCRCAYGYYQDETTGRCEACRVCEAGSGLVFSCQDKQNTVCEECPDGTYSDEANHVDPCLPCTVCEDTERQLRECTRWADAECEEPKFWVLVVVGGVLACYSLLVTVAFIIFWVRSKRSRLLHSDYMNMTPRRPGPTRKHYQPYAPPRDFAAYRSRVKFSRSADAPAYQQGQNQLYNELNLGRREEYDVLDKRRGRDPEMGGKPRRKNPQEGLYNELQKDKMAEAYSEIGMKGERRRGKGHDGLYQGLSTATKDTYDALHMQALPPR

SEQ ID NO: 206890 - protein, 608 aa, Artificial Sequence
  Description of Artificial Sequence: Synthetic Chimeric Antigen Receptor
MEAPAQLLFLLLLWLPDTTGEIVLTQSPATLSLSPGERATLSCSASSSINYIYWLQQKPGQAPRILIYLTSNLASGVPARFSGSGSGTDFTLTISSLEPEDFAVYYCLQWSSNPLTFGGGTKVEIKRGGGGSGGGGSGGGGSGGGGSEVQLVESGGGLVKPGGSLRLSCAASGFTFSSYDMSWVRQAPGKGLEWVSTISSGGSYTYYLDSIKGRFTISRDNAKNSLYLQMNSLRAEDTAVYYCARQGLDYWGRGTLVTVSSGDPKEACPTGLYTHSGECCKACNLGEGVAQPCGANQTVCEPCLDSVTFSDVVSATEPCKPCTECVGLQSMSAPCVEADDAVCRCAYGYYQDETTGRCEACRVCEAGSGLVFSCQDKQNTVCEECPDGTYSDEANHVDPCLPCTVCEDTERQLRECTRWADAECEEPKFWVLVVVGGVLACYSLLVTVAFIIFWVRSKRSRLLHSDYMNMTPRRPGPTRKHYQPYAPPRDFAAYRSRVKFSRSADAPAYQQGQNQLYNELNLGRREEYDVLDKRRGRDPEMGGKPRRKNPQEGLYNELQKDKMAEAYSEIGMKGERRRGKGHDGLYQGLSTATKDTYDALHMQALPPR

SEQ ID NO: 206891 - protein, 609 aa, Artificial Sequence
  Description of Artificial Sequence: Synthetic Chimeric Antigen Receptor
MEAPAQLLFLLLLWLPDTTGEIVLTQSPATLSLSPGERATLSCSASSSINYIYWLQQKPGQAPRILIYLTSNLASGVPARFSGSGSGTDFTLTISSLEPEDFAVYYCLQWSSNPLTFGGGTKVEIKRGGGGSGGGGSGGGGSGGGGSEVQLVESGGGLVKPGGSLRLSCAASGFTFSSYDMSWVRQAPGKGLEWVSTISSGGSYTYYLDSIKGRFTISRDNAKNSLYLQMNSLRAEDTAVYYCARQGLDYWGRGTLVTVSSGDPKEACPTGLYTHSGECCKACNLGEGVAQPCGANQTVCEPCLDSVTFSDVVSATEPCKPCTECVGLQSMSAPCVEADDAVCRCAYGYYQDETTGRCEACRVCEAGSGLVFSCQDKQNTVCEECPDGTYSDEANHVDPCLPCTVCEDTERQLRECTRWADAECEEPKFWVLVVVGGVLACYSLLVTVAFIIFWVRSKRSRLLHSDYMNMTPRRPGPTRKHYQPYAPPRDFAAYRSRVKFSRSADAPAYQQGQNQLYNELNLGRREEYDVLDKRRGRDPEMGGKPQRRKNPQEGLYNELQKDKMAEAYSEIGMKGERRRGKGHDGLYQGLSTATKDTYDALHMQALPPR

SEQ ID NO: 206892 - protein, 636 aa, Artificial Sequence
  Description of Artificial Sequence: Synthetic Chimeric Antigen Receptor
MEAPAQLLFLLLLWLPDTTGEIVLTQSPATLSLSPGERATLSCSASSSINYIYWLQQKPGQAPRILIYLTSNLASGVPARFSGSGSGTDFTLTISSLEPEDFAVYYCLQWSSNPLTFGGGTKVEIKRGGGGSGGGGSEVQLVESGGGLVKPGGSLRLSCAASGFTFSSYDMSWVRQAPGKGLEWVSTISSGGSYTYYLDSIKGRFTISRDNAKNSLYLQMNSLRAEDTAVYYCARQGLDYWGRGTLVTVSSGDPKEACPTGLYTHSGECCKACNLGEGVAQPCGANQTVCEPCLDSVTFSDVVSATEPCKPCTECVGLQSMSAPCVEADDAVCRCAYGYYQDETTGRCEACRVCEAGSGLVFSCQDKQNTVCEECPDGTYSDEAARAADAECEEIPGRWITRSTPPEGSDSTAPSTQEPEAPPEQDLIASTVAGVVTTVMGSSQPVVTRGTTDNPKFWVLVVVGGVLACYSLLVTVAFIIFWVRSKRSRLLHSDYMNMTPRRPGPTRKHYQPYAPPRDFAAYRSRVKFSRSADAPAYQQGQNQLYNELNLGRREEYDVLDKRRGRDPEMGGKPRRKNPQEGLYNELQKDKMAEAYSEIGMKGERRRGKGHDGLYQGLSTATKDTYDALHMQALPPR

SEQ ID NO: 206893 - protein, 646 aa, Artificial Sequence
  Description of Artificial Sequence: Synthetic Chimeric Antigen Receptor
MEAPAQLLFLLLLWLPDTTGEIVLTQSPATLSLSPGERATLSCSASSSINYIYWLQQKPGQAPRILIYLTSNLASGVPARFSGSGSGTDFTLTISSLEPEDFAVYYCLQWSSNPLTFGGGTKVEIKRGGGGSGGGGSGGGGSGGGGSEVQLVESGGGLVKPGGSLRLSCAASGFTFSSYDMSWVRQAPGKGLEWVSTISSGGSYTYYLDSIKGRFTISRDNAKNSLYLQMNSLRAEDTAVYYCARQGLDYWGRGTLVTVSSGDPKEACPTGLYTHSGECCKACNLGEGVAQPCGANQTVCEPCLDSVTFSDVVSATEPCKPCTECVGLQSMSAPCVEADDAVCRCAYGYYQDETTGRCEACRVCEAGSGLVFSCQDKQNTVCEECPDGTYSDEAARAADAECEEIPGRWITRSTPPEGSDSTAPSTQEPEAPPEQDLIASTVAGVVTTVMGSSQPVVTRGTTDNPKFWVLVVVGGVLACYSLLVTVAFIIFWVRSKRSRLLHSDYMNMTPRRPGPTRKHYQPYAPPRDFAAYRSRVKFSRSADAPAYQQGQNQLYNELNLGRREEYDVLDKRRGRDPEMGGKPRRKNPQEGLYNELQKDKMAEAYSEIGMKGERRRGKGHDGLYQGLSTATKDTYDALHMQALPPR

SEQ ID NO: 206894 - protein, 647 aa, Artificial Sequence
  Description of Artificial Sequence: Synthetic Chimeric Antigen Receptor
MEAPAQLLFLLLLWLPDTTGEIVLTQSPATLSLSPGERATLSCSASSSINYIYWLQQKPGQAPRILIYLTSNLASGVPARFSGSGSGTDFTLTISSLEPEDFAVYYCLQWSSNPLTFGGGTKVEIKRGGGGSGGGGSGGGGSGGGGSEVQLVESGGGLVKPGGSLRLSCAASGFTFSSYDMSWVRQAPGKGLEWVSTISSGGSYTYYLDSIKGRFTISRDNAKNSLYLQMNSLRAEDTAVYYCARQGLDYWGRGTLVTVSSGDPKEACPTGLYTHSGECCKACNLGEGVAQPCGANQTVCEPCLDSVTFSDVVSATEPCKPCTECVGLQSMSAPCVEADDAVCRCAYGYYQDETTGRCEACRVCEAGSGLVFSCQDKQNTVCEECPDGTYSDEAARAADAECEEIPGRWITRSTPPEGSDSTAPSTQEPEAPPEQDLIASTVAGVVTTVMGSSQPVVTRGTTDNPKFWVLVVVGGVLACYSLLVTVAFIIFWVRSKRSRLLHSDYMNMTPRRPGPTRKHYQPYAPPRDFAAYRSRVKFSRSADAPAYQQGQNQLYNELNLGRREEYDVLDKRRGRDPEMGGKPQRRKNPQEGLYNELQKDKMAEAYSEIGMKGERRRGKGHDGLYQGLSTATKDTYDALHMQALPPR

SEQ ID NO: 206895 - protein, 658 aa, Artificial Sequence
  Description of Artificial Sequence: Synthetic Chimeric Antigen Receptor
MEAPAQLLFLLLLWLPDTTGEIVLTQSPATLSLSPGERATLSCSASSSINYIYWLQQKPGQAPRILIYLTSNLASGVPARFSGSGSGTDFTLTISSLEPEDFAVYYCLQWSSNPLTFGGGTKVEIKRGGGGSGGGGSEVQLVESGGGLVKPGGSLRLSCAASGFTFSSYDMSWVRQAPGKGLEWVSTISSGGSYTYYLDSIKGRFTISRDNAKNSLYLQMNSLRAEDTAVYYCARQGLDYWGRGTLVTVSSGDPKEACPTGLYTHSGECCKACNLGEGVAQPCGANQTVCEPCLDSVTFSDVVSATEPCKPCTECVGLQSMSAPCVEADDAVCRCAYGYYQDETTGRCEACRVCEAGSGLVFSCQDKQNTVCEECPDGTYSDEANHVDPCLPCTVCEDTERQLRECTRWADAECEEIPGRWITRSTPPEGSDSTAPSTQEPEAPPEQDLIASTVAGVVTTVMGSSQPVVTRGTTDNPKFWVLVVVGGVLACYSLLVTVAFIIFWVRSKRSRLLHSDYMNMTPRRPGPTRKHYQPYAPPRDFAAYRSRVKFSRSADAPAYQQGQNQLYNELNLGRREEYDVLDKRRGRDPEMGGKPRRKNPQEGLYNELQKDKMAEAYSEIGMKGERRRGKGHDGLYQGLSTATKDTYDALHMQALPPR

SEQ ID NO: 206896 - protein, 668 aa, Artificial Sequence
  Description of Artificial Sequence: Synthetic Chimeric Antigen Receptor
MEAPAQLLFLLLLWLPDTTGEIVLTQSPATLSLSPGERATLSCSASSSINYIYWLQQKPGQAPRILIYLTSNLASGVPARFSGSGSGTDFTLTISSLEPEDFAVYYCLQWSSNPLTFGGGTKVEIKRGGGGSGGGGSGGGGSGGGGSEVQLVESGGGLVKPGGSLRLSCAASGFTFSSYDMSWVRQAPGKGLEWVSTISSGGSYTYYLDSIKGRFTISRDNAKNSLYLQMNSLRAEDTAVYYCARQGLDYWGRGTLVTVSSGDPKEACPTGLYTHSGECCKACNLGEGVAQPCGANQTVCEPCLDSVTFSDVVSATEPCKPCTECVGLQSMSAPCVEADDAVCRCAYGYYQDETTGRCEACRVCEAGSGLVFSCQDKQNTVCEECPDGTYSDEANHVDPCLPCTVCEDTERQLRECTRWADAECEEIPGRWITRSTPPEGSDSTAPSTQEPEAPPEQDLIASTVAGVVTTVMGSSQPVVTRGTTDNPKFWVLVVVGGVLACYSLLVTVAFIIFWVRSKRSRLLHSDYMNMTPRRPGPTRKHYQPYAPPRDFAAYRSRVKFSRSADAPAYQQGQNQLYNELNLGRREEYDVLDKRRGRDPEMGGKPRRKNPQEGLYNELQKDKMAEAYSEIGMKGERRRGKGHDGLYQGLSTATKDTYDALHMQALPPR

SEQ ID NO: 206897 - protein, 708 aa, Artificial Sequence [sequence omitted]

SEQ ID NO: 206898 - protein, 526 aa, Artificial Sequence
  Description of Artificial Sequence: Synthetic Chimeric Antigen Receptor
MALPVTALLLPLALLLHAARPDIQVTQSPSSLSASLGERISLTCRTSQDISNYLNWFQQKPDGTFKRLIYATSSLDSGVPKRFSGSGSGSDYSLTISSLESEDFADYYCLQYASYPFTFGSGTKLEIKGGGGSGGGGSGGGGSEVQLQESGPGLVKPSQTLSLTCSVTGYSITSGYYWHWIRQFPGNKLQWMGYISYSGFTNYKTSLINRISITHDTSENQFFLNLNSVTTEDTATYYCAGDRTGSWFAYWGQGTLVTVSATTTPAPRPPTPAPTIASQPLSLRPEACRPAAGGAVHTRGLDFACDIYIWAPLAGTCGVLLLSLVITLYCRSKRSRLLHSDYMNMTPRRPGPTRKHYQPYAPPRDFAAYRSKRGRKKLLYIFKQPFMRPVQTTQEEDGCSCRFPEEEEGGCELRVKFSRSADAPAYQQGQNQLYNELNLGRREEYDVLDKRRGRDPEMGGKPQRRKNPQEGLYNELQKDKMAEAYSEIGMKGERRRGKGHDGLYQGLSTATKDTYDALHMQALPPR

SEQ ID NO: 206899 - protein, 529 aa, Artificial Sequence
  Description of Artificial Sequence: Synthetic Chimeric Antigen Receptor
MALPVTALLLPLALLLHAARPDIQMTQSPSSLSASVGDRVTITCKASQNIDKYLNWYQQKPGKAPKLLIYNTNNLQTGVPSRFSGSGSGTDFTFTISSLQPEDIATYYCLQHISRPRTFGQGTKVEIKGGGGSGGGGSGGGGSQVQLQESGPGLVRPSQTLSLTCTVSGFTFTDFYMNWVRQPPGRGLEWIGFIRDKAKGYTTEYNPSVKGRVTMLVDTSKNQFSLRLSSVTAADTAVYYCAREGHTAAPFDYWGQGSLVTVSSTTTPAPRPPTPAPTIASQPLSLRPEACRPAAGGAVHTRGLDFACDIYIWAPLAGTCGVLLLSLVITLYCRSKRSRLLHSDYMNMTPRRPGPTRKHYQPYAPPRDFAAYRSKRGRKKLLYIFKQPFMRPVQTTQEEDGCSCRFPEEEEGGCELRVKFSRSADAPAYQQGQNQLYNELNLGRREEYDVLDKRRGRDPEMGGKPQRRKNPQEGLYNELQKDKMAEAYSEIGMKGERRRGKGHDGLYQGLSTATKDTYDALHMQALPPR

SEQ ID NO: 206900 - protein, 686 aa, Artificial Sequence
  Description of Artificial Sequence: Synthetic Chimeric Antigen Receptor
MEFGLSWLFLVAILKGVQCIDAMGNIQLVQSGPELKKPGETVKISCKASGYTFTNYGMNWVKQAPGKGLRWMGWINTHTGEPTYADDFKGRFAFSLETSASTAYLQINNLKNEDTATYFCTRRGYDWYFDVWGAGTTVTVSSGGGGSGGGGSGGGGSDIKMTQSPSSMYASLGERVTITCKASQDINSYLSWFHHKPGKSPKTLIYRANRLVDGVPSRFSGSGSGQDYSLTISSLDYEDMGIYYCQQYDESPWTFGGGTKLEMKGSGDPAEPKSPDKTHTCPPCPAPELLGGPSVFLFPPKPKDTLMISRTPEVTCVVVDVSHEDPEVKFNWYVDGVEVHNAKTKPREEQYNSTYRVVSVLTVLHQDWLNGKEYKCKVSNKALPAPIEKTISKAKGQPREPQVYTLPPSRDELTKNQVSLTCLVKGFYPSDIAVEWESNGQPENNYKTTPPVLDSDGSFFLYSKLTVDKSRWQQGNVFSCSVMHEALHNHYTQKSLSLSPGKKDPKFWVLVVVGGVLACYSLLVTVAFIIFWVRSKRSRLLHSDYMNMTPRRPGPTRKHYQPYAPPRDFAAYRSRVKFSRSADAPAYQQGQNQLYNELNLGRREEYDVLDKRRGRDPEMGGKPRRKNPQEGLYNELQKDKMAEAYSEIGMKGERRRGKGHDGLYQGLSTATKDTYDALHMQALPPR

SEQ ID NO: 206901 - protein, 540 aa, Artificial Sequence
  Description of Artificial Sequence: Synthetic Chimeric Antigen Receptor
MALPVTALLLPLALLLHAARPGAQPAMAAYKDIQMTQTTSSLSASLGDRVTISCSASQGISNYLNWYQQKPDGTNKLLIYYTSSLHSGVPSRFSGSGSGTDYSLHSNLEPEDIATYYCQQYSKLPYTFGGGTKLEIKRGGGGSGGGGSGGGGSGGGGSEVQLVESGGGLVKPGGSLKLSCAASGLTFSSYAMSWNRQTPEKRLEWVASISSGGFTYYPDSNKGRFTISRDNARNILYLQMSSLRSEDTAMYYCARDEVRGYLDVWGAGTTVTVSSTTTPAPRPPTPAPTIASQPLSLRPEACRPAAGGAVHTRGLDFACDIYIWAPLAGTCGVLLLSLVITLYCRSKRSRLLHSDYMNMTPRRPGPTRKHYQPYAPPRDFAAYRSKRGRKKLLYIFKQPFMRPVQTTQEEDGCSCRFPEEEEGGCELRVKFSRSADAPAYQQGQNQLYNELNLGRREEYDVLDKRRGRDPEMGGKPQRRKNPQEGLYNELQKDKMAEAYSEIGMKGERRRGKGHDGLYQGLSTATKDTYDALHMQALPPR

SEQ ID NO: 206902 - protein, 244 aa, Artificial Sequence
  Description of Artificial Sequence: Synthetic Chimeric Antigen Receptor
GVHSQVQLQESGPGLVRPSQTLSLTCTVSGFTISSGYSWHWVRQPPGRGLEWIGYIQYSGITNYNPSLKSRVTMLVDTSKNQFSLRLSSVTAADTAVYYCAREDYDYHWYFDVWGQGTTVTVSSGGGGSGGGGSGGGGSDIQLTQSPSSLSASVGDRVTITCSTSSSVSYMHWYQQKPGKAPKLLIYSTSNLASGVPSRFSGSGSGTDFTFTISSLQPEDIATYYCHQWSSYPTFGQGTKVEIK

SEQ ID NO: 206903 - protein, 459 aa, Artificial Sequence
  Description of Artificial Sequence: Synthetic Chimeric Antigen Receptor
MALPVTALLLPLALLLHAARPQVQLVESGGGVVQPGRSLRLSCAASGFTFSSYGMHWVRQAPGKGLEWVAVIWYDGSDKYFADSVKGRFTISRDNSKNTLYLQMNSLRAEDTAVYYCARDGIAGARYVYFDYWGQGTLVTVSSGGGGSGGGGSGGGGSDIQMTQSPSSLSASVGDRVTITCRASQGISNYLAWFQQKPGKAPKSLIYAASSLQGGVPSKFSGSGSGTDFTLTISSLQPEDFATYYCQQYYNYPFTFGPGTTVDIKGLAVSTISSFFPPGYQIYIWAPLAGTCGVLLLSLVITLYCKRGRKKLLYIFKQPFMRPVQTTQEEDGCSCRFPEEEEGGCELRVKFSRSADAPAYQQGQNQLYNELNLGRREEYDVLDKRRGRDPEMGGKPRRKNPQEGLYNELQKDKMAEAYSEIGMKGERRRGKGHDGLYQGLSTATKDTYDALHMQALPPR

SEQ ID NO: 206904 - protein, 464 aa, Artificial Sequence
  Description of Artificial Sequence: Synthetic Chimeric Antigen Receptor
MALPVTALLLPLALLLHAARPQVQLVESGGGVVQPGRSLRLSCAASGFTFSNYGIHWVRQAPGKGLEWVAVIWYDGSNKYYADSVKGRFTISRDNSKNTLYLQMNSLRAEDTAVYYCARDGGYSGYDSGFDYWGQGTLVTVSSGGGGSGGGGSGGGGSDIVMTQSPLSLPVTPGEPASISCRSSQSLLNSNGYNYLDWYLQKPGQSPQFLIYLGSYRASGVPDRFSGSGSGTDFTLRISRVEAEDVGVYYCIQTLQTPFTFGPGTKVDIKGLAVSTISSFFPPGYQIYIWAPLAGTCGVLLLSLVITLYCKRGRKKLLYIFKQPFMRPVQTTQEEDGCSCRFPEEEEGGCELRVKFSRSADAPAYQQGQNQLYNELNLGRREEYDVLDKRRGRDPEMGGKPRRKNPQEGLYNELQKDKMAEAYSEIGMKGERRRGKGHDGLYQGLSTATKDTYDALHMQALPPR

SEQ ID NO: 206905 - protein, 493 aa, Artificial Sequence
  Description of Artificial Sequence: Synthetic Chimeric Antigen Receptor
MALPVTALLLPLALLLHAARPQVQLVESGGGVVQPGRSLRLSCAASGFTFSNYGIHWVRQAPGKGLEWVAVIWYDGSNKYYADSVKGRFTISRDNSKNTLYLQMNSLRAEDTAVYYCARDGGYSGYDSGFDYWGQGTLVTVSSGGGGSGGGGSGGGGSDIVMTQSPLSLPVTPGEPASISCRSSQSLLNSNGYNYLDWYLQKPGQSPQFLIYLGSYRASGVPDRFSGSGSGTDFTLRISRVEAEDVGVYYCIQTLQTPFTFGPGTKVDIKTTTPAPRPPTPAPTIASQPLSLRPEACRPAAGGAVHTRGLDFACDIYIWAPLAGTCGVLLLSLVITLYCKRGRKKLLYIFKQPFMRPVQTTQEEDGCSCRFPEEEEGGCELRVKFSRSADAPAYQQGQNQLYNELNLGRREEYDVLDKRRGRDPEMGGKPRRKNPQEGLYNELQKDKMAEAYSEIGMKGERRRGKGHDGLYQGLSTATKDTYDALHMQALPPR

SEQ ID NO: 206906 - protein, 488 aa, Artificial Sequence
  Description of Artificial Sequence: Synthetic Chimeric Antigen Receptor
MALPVTALLLPLALLLHAARPQVQLVESGGGVVQPGRSLRLSCAASGFTFSSYGMHWVRQAPGKGLEWVAVIWYDGSDKYFADSVKGRFTISRDNSKNTLYLQMNSLRAEDTAVYYCARDGIAGARYVYFDYWGQGTLVTVSSGGGGSGGGGSGGGGSDIQMTQSPSSLSASVGDRVTITCRASQGISNYLAWFQQKPGKAPKSLIYAASSLQGGVPSKFSGSGSGTDFTLTISSLQPEDFATYYCQQYYNYPFTFGPGTTVDIKTTTPAPRPPTPAPTIASQPLSLRPEACRPAAGGAVHTRGLDFACDIYIWAPLAGTCGVLLLSLVITLYCKRGRKKLLYIFKQPFMRPVQTTQEEDGCSCRFPEEEEGGCELRVKFSRSADAPAYQQGQNQLYNELNLGRREEYDVLDKRRGRDPEMGGKPRRKNPQEGLYNELQKDKMAEAYSEIGMKGERRRGKGHDGLYQGLSTATKDTYDALHMQALPPR

SEQ ID NO: 206907 - protein, 584 aa, Artificial Sequence
  Description of Artificial Sequence: Synthetic Chimeric Antigen Receptor
MALPVTALLLPLALLLHAARPQVQLVESGGGVVQPGRSLRLSCAASGFTFSNYGIHWVRQAPGKGLEWVAVIWYDGSNKYYADSVKGRFTISRDNSKNTLYLQMNSLRAEDTAVYYCARDGGYSGYDSGFDYWGQGTLVTVSSGGGGSGGGGSGGGGSDIVMTQSPLSLPVTPGEPASISCRSSQSLLNSNGYNYLDWYLQKPGQSPQFLIYLGSYRASGVPDRFSGSGSGTDFTLRISRVEAEDVGVYYCIQTLQTPFTFGPGTKVDIKEPKSPDKTHTCPPCPAPPVAGPSVFLFPPKPKDTLMIARTPEVTCVVVDVSHEDPEVKFNWYVDGVEVHNAKTKPREEQYNSTYRVVSVLTVLHQDWLNGKEYKCKVSNKALPAPIEKTISKAKGQPREPQVYTLPPSRDELTKNQVSLTCLVKGFYPSDIAVEWESNGQPENNYKTTPPVLDSDGSFFLYSKLTVDKSRWQQGNVFSCSVMHEALHNHYTQKSLSLSPGKIYIWAPLAGTCGVLLLSLVITLYCKRGRKKLLYIFKQPFMRPVQTTQEEDGCSCRFPEEEEGGCELRVKFSRSADAPAYQQGQ

SEQ ID NO: 206908 - protein, 674 aa, Artificial Sequence
  Description of Artificial Sequence: Synthetic Chimeric Antigen Receptor
MALPVTALLLPLALLLHAARPQIQLVQSGPEVKKPGETVKISCKASGYTFTNYGMNWVKQAPGKGLKWMGINTYTGEPTYADAFKGRFAFSLETSASTAYLQINNLKNEDTATYFCARDYGDYGMDYWGQGTSVTVSSGGGGSGGGGSGGGGSDIVLTQSPASLAVSLGQRATISCRASKSVSTSGYSFMHWYQQKPGQPPKLLIYLASNLESGVPARFSGSGSGTDFTLNIHPVEEEDAATYYCQHSREVPWTFGGGTKLEIKREPKSPDKTHTCPPCPAPPVAGPSVFLFPPKPKDTLMIARTPEVTCVVVDVSHEDPEVKFNWYVDGVEVHNAKTKPREEQYNSTYRVVSVLTVLHQDWLNGKEYKCKVSNKALPAPIEKTISKAKGQPREPQVYTLPPSRDELTKNQVSLTCLVKGFYPSDIAVEWESNGQPENNYKTTPPVLDSDGSFFLYSKLTVDKSRWQQGNVFSCSVMHEALHNHYTQKSLSLSPGKIYIWAPLAGTCGVLLLSLVITLYCKRGRKKLLYIFKQPFMRPVQTTQEEDGCSCRFPEEEEGGCELRVKFSRSADAPAYQQGQNQLYNELNLGRREEYDVLDKRRGRDPEMGGKPRRKNPQEGLYNELQKDKMAEAYSEIGMKGERRRGKGHDGLYQGLSTATKDTYDALHMQALPPR

SEQ ID NO: 206909 - protein, 674 aa, Artificial Sequence
  Description of Artificial Sequence: Synthetic Chimeric Antigen Receptor
MALPVTALLLPLALLLHAARPQVQLVESGGGVVQPGRSLRLSCAASGFTFSSYGMHWVRQAPGKGLEWVAVIWYDGSDKYFADSVKGRFTISRDNSKNTLYLQMNSLRAEDTAVYYCARDGIAGARYVYFDYWGQGTLVTVSSGGGGSGGGGSGGGGSDIQMTQSPSSLSASVGDRVTITCRASQGISNYLAWFQQKPGKAPKSLIYAASSLQGGVPSKFSGSGSGTDFTLTISSLQPEDFATYYCQQYYNYPFTFGPGTTVDIKEPKSPDKTHTCPPCPAPPVAGPSVFLFPPKPKDTLMIARTPEVTCVVVDVSHEDPEVKFNWYVDGVEVHNAKTKPREEQYNSTYRVVSVLTVLHQDWLNGKEYKCKVSNKALPAPIEKTISKAKGQPREPQVYTLPPSRDELTKNQVSLTCLVKGFYPSDIAVEWESNGQPENNYKTTPPVLDSDGSFFLYSKLTVDKSRWQQGNVFSCSVMHEALHNHYTQKSLSLSPGKIYIWAPLAGTCGVLLLSLVITLYCKRGRKKLLYIFKQPFMRPVQTTQEEDGCSCRFPEEEEGGCELRVKFSRSADAPAYQQGQNQLYNELNLGRREEYDVLDKRRGRDPEMGGKPRRKNPQEGLYNELQKDKMAEAYSEIGMKGERRRGKGHDGLYQGLSTATKDTYDALHMQALPPR

SEQ ID NO: 206910 - protein, 741 aa, Artificial Sequence
  Description of Artificial Sequence: Synthetic Chimeric Antigen Receptor
AQLEKELQALEKENAQLEWELQALEKELAQSGGGGSADAPAYQQGQNQLYNELNLGRREEYDVLDKRRGRDPEMGGKPRRKNPQEGLYNELQKDKMAEAYSEIGMKGERRRGKGHDGLYQGLSTATKDTYDALHMQALPPRRAEGRGSLLTCGDVEENPGPMAVPTQVLGLLLLWLTDARCDIQMTQSPSSLSASVGDRVTITCRASEDIYFNLVWYQQKPGKAPKLLIYDTNRLADGVPSRFSGSGSGTQYTLTISSLQPEDFATYYCQHYKNYPLTFGQGTKLEIKRSGGGGSGGGGSGGGGSRSEVQLVESGGGLVQPGGSLRLSCAASGFTLSNYGMHWIRQAPGKGLEWVSSISLNGGSTYYRDSVKGRFTISRDNAKSTLYLQMNSLRAEDTAVYYCAAQDAYTGGYFDYWGQGTLVTVSSMPCPAPPVAGPSVFLFPPKPKDTLMIARTPEVTCVVVDVSHEDPEVKFNWYVDGVEVHNAKTKPREEQYNSTYRVVSVLTVLHQDWLNGKEYKCKVSNKALPAPIEKTISKAKPCPAPPVAGPSVFLFPPKPKDTLMIARTPEVTCVVVDVSHEDPEVKFNWYVDGVEVHNAKTKPREEQYNSTYRVVSVLTVLHQDWLNGKEYKCKVSNKALPAPIEKTISKAKMALIVLGGVAGLLLFIGLGIFFMALIVLGGVAGLLLFIGLGIFFCVRCRHRRRSGGGGSAQLEKKLQALKKKNAQLKWKLQALKKKLAQ

SEQ ID NO: 206911 - protein, 455 aa, Artificial Sequence
  Description of Artificial Sequence: Synthetic Chimeric Antigen Receptor
MALPVTALLLPLALLLHAARPQVQLQESGPGLVKPSETLSLTCVVSGGSISSSNWWSWVRQPPGKGLEWIGEIYHSGSPNYNPSLKSRVTISVDKSKNQFSLKLSSVTAADTAVYYCARSSSGGFFDYWGQGTLVTVSSGGGGSGGGGSGGGGSDIQMTQSPSSLSASVGDRVTITCRASQSISSYLNWYQQKPGKAPKLLIYAASSLQSGVPSRFSGSGSGTDFTLTISSLQPEDFATYYCQQSYSTPPTFGQGTKVEIKGLAVSTISSFFPPGYQIYIWAPLAGTCGVLLLSLVITLYCKRGRKKLLYIFKQPFMRPVQTTQEEDGCSCRFPEEEEGGCELRVKFSRSADAPAYQQGQNQLYNELNLGRREEYDVLDKRRGRDPEMGGKPRRKNPQEGLYNELQKDKMAEAYSEIGMKGERRRGKGHDGLYQGLSTATKDTYDALHMQALPPR

SEQ ID NO: 206912 - protein, 719 aa, Artificial Sequence
  Description of Artificial Sequence: Synthetic Chimeric Antigen Receptor
MAPAMESPTLLCVALLFFAPDGVLAMNIFLLSVLLALLPNVFTARVDQTPRTATKETGESLTINCVLRDTSCAFSSTGWYRTKLGSTNEQSISIGGRYVETVNKGSKSFSLRISDLRVEDSGTYKCQAYVIATMAPLCYASYSWNEKGAGTVLTVKPGVQPSPPVISLLYSATEEQRGNGFVQLICLISGYYFFIPLLVVILFAVDTGLFISTQQQVTFLLKIKRTRKGFRLLNPHPKPNPKNNRAEGRGSLLTCGDVEENPGPMDTESNRRANLALPQEPSSVPAFEVLEISPQEVSSGRLLKSASSPPLHTWLTVLKKEQEFLGVTQILTAMICLCFGTVVCSVLDISHIEGDIFSSFKAGYPFWGAIFFSISGMLSIISERRNATYLVRGSLGANTASSIAGGTGITILIINLKKSLAYIHIHSCQKFFETKCFMASFSTEIVVMMLFLTILGLGSAVSLTICGAGEELKGNKVPEKRGRKKLLYIFKQPFMRPVQTTQEEDGCSCRFPEEEEGGCELGSGVKQTLNFDLLKLAGDVESNPGPMIPAVVLLLLLLVEQAAALGEPQLCYILDAILFLYGIVLTLLYCRLKIQVRKAAITSYEKSRVKFSRSADAPAYQQGQNQLYNELNLGRREEYDVLDKRRGRDPEMGGKPRRKNPQEGLYNELQKDKMAEAYSEIGMKGERRRGKGHDGLYQGLSTATKDTYDALHMQALPPR

SEQ ID NO: 206913 - protein, 513 aa, Artificial Sequence
  Description of Artificial Sequence: Synthetic Chimeric Antigen Receptor
MSVPTQVLGLLLLWLTGARCDIQMTQSPASLSASVGDTVTITCRASENIYSYLAWYQQKQGKSPQLLVYNAKALSEGVPSRFSGSGSGTQFSLRINSLQPEDFGDYYCQHHYNSPYTFGGGTKLEIKGSTSGSGKSSEGKGQIQLVQSGPELKKPGETVKISCKASGYSFTNDGINWVKQAPGKGFKYMGWINTITGEPTYTEDFKGRFAFSLETSASTAYLQINNLKDEDTATFFCAKGTGTSAYWGQGTLVTVSATSLSNSIMYFSHFVPVFLPAKPTTTPAPRPPTPAPTIASQPLSLRPEACRPAAGGAVHTRGLDSRFWVLVVVGGVLACYSLLVTVAFIIFWVRLRVKFSRSADAPAYQQGQNQLYNELNLGRREEYDVLDKRRGRDPEMGGKPQRRKNPQEGLYNELQKDKMAEAYSEIGMKGERRRGKGHDGLYQGLSTATKDTYDALHMQALPPRRSQCMWPRETQLLLEVPPSTEDARSCQFPEEERGERSAEEKGRLGDLWV

SEQ ID NO: 206914 - protein, 553 aa, Artificial Sequence
  Description of Artificial Sequence: Synthetic Chimeric Antigen Receptor
MSVPTQVLGLLLLWLTGARCDIQMTQSPASLSASVGDTVTITCRASENIYSYLAWYQQKQGKSPQLLVYNAKALSEGVPSRFSGSGSGTQFSLRINSLQPEDFGDYYCQHHYNSPYTFGGGTKLEIKGSTSGSGKSSEGKGQIQLVQSGPELKKPGETVKISCKASGYSFTNDGINWVKQAPGKGFKYMGWINTITGEPTYTEDFKGRFAFSLETSASTAYLQINNLKDEDTATFFCAKGTGTSAYWGQGTLVTVSATSLSNSIMYFSHFVPVFLPAKPTTTPAPRPPTPAPTIASQPLSLRPEACRPAAGGAVHTRGLDSRFWVLVVVGGVLACYSLLVTVAFIIFWVRLRVKFSRSADAPAYQQGQNQLYNELNLGRREEYDVLDKRRGRDPEMGGKPQRRKNPQEGLYNELQKDKMAEAYSEIGMKGERRRGKGHDGLYQGLSTATKDTYDALHMQALPPRRSQCMWPRETQLLLEVPPSTEDARSCQFPEEERGERSAEEKGRLGDLWVSKRSRLLHSDYMNMTPRRPGPTRKHYQPYAPPRDFAAYRS

SEQ ID NO: 206915 - protein, 793 aa, Artificial Sequence
  Description of Artificial Sequence: Synthetic Chimeric Antigen Receptor
MVSKGEELFTGVVPILVELDGDVNGHKFSVSGEGEGDATYGKLTLKFICTTGKLPVPWPTLVTTLTYGVQCFSRYPDHMKQHDFFKSAMPEGYVQERTIFFKDDGNYKTRAEVKFEGDTLVNRIELKGIDFKEDGNILGHKLEYNYNSHNVYIMADKQKNGIKVNFKIRHNIEDGSVQLADHYQQNTPIGDGPVLLPDNHYLSTQSALSKDPNEKRDHMVLLEFVTAAGITLGMDELYKSGVKQTLNFDLLKLAGDVESNPGPMALPVTALLLPLALLLHAARPDIQMTQSPASLSASVGETVTITCRASENIDSYLAWYQQKQGKSPQLLVYASTLLVDGVPSRFSGSRSGTQFSLKINSLQSEDVARYYCQHYYSIPYTFGSGTKLEIKGGGGSGGGGSGGGGSEVKLVESGGGLVKPGGSLKLSCAASGFTFNSYTMSWVRQTPAKRLEWVVTISSGGGRTYYPDSVKGRFTISRDNARNTLYLQMSSLRSEDTAMYYCIRGDYRYDGFAYWGQGTVVTVSTTTTPAPRPPTPAPTIASQPLSLRPEACRPAAGGAVHTRGLDFACDFWVLVVVGGVLACYSLLVTVAFIIFWVRSKRSRLLHSDYMNMTPRRPGPTRKHYQPYAPPRDFAAYRSKRGRKKLLYIFKQPFMRPVQTTQEEDGCSCRFPEEEEGGCELRVKFSRSADAPAYQQGQNQLYNELNLGRREEYDVLDKRRGRDPEMGGKPQRRKNPQEGLYNELQKDKMAEAYSEIGMKGERRRGKGHDGLYQGLSTATKDTYDALHMQALPPR

SEQ ID NO: 206916 - protein, 918 aa, Artificial Sequence
  Description of Artificial Sequence: Synthetic Chimeric Antigen Receptor
MAPAMESPTLLCVALLFFAPDGVLAMNIFLLSVLLALLPNVFTARVDQTPRTATKETGESLTINCVLRDTSCAFSSTGWYRTKLGSTNEQSISIGGRYVETVNKGSKSFSLRISDLRVEDSGTYKCQAYVIATMAPLCYASYSWNEKGAGTVLTVKEPKSPDKTHTCPPCPAPPVAGPSVFLFPPKPKDTLMIARTPEVTCVVVDVSHEDPEVKFNWYVDGVEVHNAKTKPREEQYNSTYRVVSVLTVLHQDWLNGKEYKCKVSNKALPAPIEKTISKAKGQPREPQVYTLPPSRDELTKNQVSLTCLVKGFYPSDIAVEWESNGQPENNYKTTPPVLDSDGSFFLYSKLTVDKSRWQQGNVFSCSVMHEALHNHYTQKSLSLSPGKKDPKFFIPLLVVILFAVDTGLFISTQQQVTFLLKIKRTRKGFRLLNPHPKPNPKNNRAEGRGSLLTCGDVEENPGPMDTESNRRANLALPQEPSSVPAFEVLEISPQEVSSGRLLKSASSPPLHTWLTVLKKEQEFLGVTQILTAMICLCFGTVVCSVLDISHIEGDIFSSFKAGYPFWGAIFFSISGMLSIISERRNATYLVRGSLGANTASSIAGGTGITILIINLKKSLAYIHIHSCQKFFETKCFMASFSTEIVVMMLFLTILGLGSAVSLTICGAGEELKGNKVPEKRGRKKLLYIFKQPFMRPVQTTQEEDGCSCRFPEEEEGGCELGSGVKQTLNFDLLKLAGDVESNPGPMIPAVVLLLLLLVEQAAALGEPQLCYILDAILFLYGIVLTLLYCRLKIQVRKAAITSYEKSRVKFSRSADAPAYQQGQNQLYNELNLGRREEYDVLDKRRGRDPEMGGKPRRKNPQEGLYNELQKDKMAEAYSEIGMKGERRRGKGHDGLYQGLSTATKDTYDALHMQALPPR

SEQ ID NO: 206917 - protein, 728 aa, Artificial Sequence
  Description of Artificial Sequence: Synthetic Chimeric Antigen Receptor
MAPAMESPTLLCVALLFFAPDGVLAMNIFLLSVLLALLPNVFTARVDQTPRTATKETGESLTINCVLRDTSCAFSSTGWYRTKLGSTNEQSISIGGRYVETVNKGSKSFSLRISDLRVEDSGTYKCQAYVIATMAPLCYASYSWNEKGAGTVLTVKTTTPAPRPPTPAPTIASQPLSLRPEACRPAAGGAVHTRGLDFACDFFIPLLVVILFAVDTGLFISTQQQVTFLLKIKRTRKGFRLLNPHPKPNPKNNRAEGRGSLLTCGDVEENPGPMDTESNRRANLALPQEPSSVPAFEVLEISPQEVSSGRLLKSASSPPLHTWLTVLKKEQEFLGVTQILTAMICLCFGTVVCSVLDISHIEGDIFSSFKAGYPFWGAIFFSISGMLSIISERRNATYLVRGSLGANTASSIAGGTGITILIINLKKSLAYIHIHSCQKFFETKCFMASFSTEIVVMMLFLTILGLGSAVSLTICGAGEELKGNKVPEKRGRKKLLYIFKQPFMRPVQTTQEEDGCSCRFPEEEEGGCELGSGVKQTLNFDLLKLAGDVESNPGPMIPAVVLLLLLLVEQAAALGEPQLCYILDAILFLYGIVLTLLYCRLKIQVRKAAITSYEKSRVKFSRSADAPAYQQGQNQLYNELNLGRREEYDVLDKRRGRDPEMGGKPRRKNPQEGLYNELQKDKMAEAYSEIGMKGERRRGKGHDGLYQGLSTATKDTYDALHMQALPPR

SEQ ID NO: 206918 - protein, 370 aa, Artificial Sequence
  Description of Artificial Sequence: Synthetic Chimeric Antigen Receptor
MAPAMESPTLLCVALLFFAPDGVLAMNIFLLSVLLALLPNVFTARVDQTPRTATKETGESLTINCVLRDTSCAFSSTGWYRTKLGSTNEQSISIGGRYVETVNKGSKSFSLRISDLRVEDSGTYKCQAYVIATMAPLCYASYSWNEKGAGTVLTVKPGVQPSPPVISLLYSATEEQRGNGFVQLICLISGYYIYIWAPLAGTCGVLLLSLVITLYCKRGRKKLLYIFKQPFMRPVQTTQEEDGCSCRFPEEEEGGCELRVKFSRSADAPAYQQGQNQLYNELNLGRREEYDVLDKRRGRDPEMGGKPRRKNPQEGLYNELQKDKMAEAYSEIGMKGERRRGKGHDGLYQGLSTATKDTYDALHMQALPPR

SEQ ID NO: 206919 - protein, 569 aa, Artificial Sequence
  Description of Artificial Sequence: Synthetic Chimeric Antigen Receptor
MAPAMESPTLLCVALLFFAPDGVLAMNIFLLSVLLALLPNVFTARVDQTPRTATKETGESLTINCVLRDTSCAFSSTGWYRTKLGSTNEQSISIGGRYVETVNKGSKSFSLRISDLRVEDSGTYKCQAYVIATMAPLCYASYSWNEKGAGTVLTVKEPKSPDKTHTCPPCPAPPVAGPSVFLFPPKPKDTLMIARTPEVTCVVVDVSHEDPEVKFNWYVDGVEVHNAKTKPREEQYNSTYRVVSVLTVLHQDWLNGKEYKCKVSNKALPAPIEKTISKAKGQPREPQVYTLPPSRDELTKNQVSLTCLVKGFYPSDIAVEWESNGQPENNYKTTPPVLDSDGSFFLYSKLTVDKSRWQQGNVFSCSVMHEALHNHYTQKSLSLSPGKKDPKIYIWAPLAGTCGVLLLSLVITLYCKRGRKKLLYIFKQPFMRPVQTTQEEDGCSCRFPEEEEGGCELRVKFSRSADAPAYQQGQNQLYNELNLGRREEYDVLDKRRGRDPEMGGKPRRKNPQEGLYNELQKDKMAEAYSEIGMKGERRRGKGHDGLYQGLSTATKDTYDALHMQALPPR

SEQ ID NO: 206920 - protein, 379 aa, Artificial Sequence
  Description of Artificial Sequence: Synthetic Chimeric Antigen Receptor
MAPAMESPTLLCVALLFFAPDGVLAMNIFLLSVLLALLPNVFTARVDQTPRTATKETGESLTINCVLRDTSCAFSSTGWYRTKLGSTNEQSISIGGRYVETVNKGSKSFSLRISDLRVEDSGTYKCQAYVIATMAPLCYASYSWNEKGAGTVLTVKTTTPAPRPPTPAPTIASQPLSLRPEACRPAAGGAVHTRGLDFACDIYIWAPLAGTCGVLLLSLVITLYCKRGRKKLLYIFKQPFMRPVQTTQEEDGCSCRFPEEEEGGCELRVKFSRSADAPAYQQGQNQLYNELNLGRREEYDVLDKRRGRDPEMGGKPRRKNPQEGLYNELQKDKMAEAYSEIGMKGERRRGKGHDGLYQGLSTATKDTYDALHMQALPPR

SEQ ID NO: 206921 - protein, 743 aa, Artificial Sequence
  Description of Artificial Sequence: Synthetic Chimeric Antigen Receptor
VQIEYLAKQIVDNAIQQASGGGGSADAPAYQQGQNQLYNELNLGRREEYDVLDKRRGRDPEMGGKPRRKNPQEGLYNELQKDKMAEAYSEIGMKGERRRGKGHDGLYQGLSTATKDTYDALHMQALPPRRAEGRGSLLTCGDVEENPGPMAVPTQVLGLLLLWLTDARCDIQMTQSPSSLSASVGDRVTITCRASEDIYFNLVWYQQKPGKAPKLLIYDTNRLADGVPSRFSGSGSGTQYTLTISSLQPEDFATYYCQHYKNYPLTFGQGTKLEIKRSGGGGSGGGGSGGGGSRSEVQLVESGGGLVQPGGSLRLSCAASGFTLSNYGMHWIRQAPGKGLEWVSSISLNGGSTYYRDSVKGRFTISRDNAKSTLYLQMNSLRAEDTAVYYCAAQDAYTGGYFDYWGQGTLVTVSSMPCPAPPVAGPSVFLFPPKPKDTLMIARTPEVTCVVVDVSHEDPEVKFNWYVDGVEVHNAKTKPREEQYNSTYRVVSVLTVLHQDWLNGKEYKCKVSNKALPAPIEKTISKAKPCPAPPVAGPSVFLFPPKPKDTLMIARTPEVTCVVVDVSHEDPEVKFNWYVDGVEVHNAKTKPREEQYNSTYRVVSVLTVLHQDWLNGKEYKCKVSNKALPAPIEKTISKAKMALIVLGGVAGLLLFIGLGIFFMALIVLGGVAGLLLFIGLGIFFCVRCRHRRRSGGGGSSHIQIPPGLTELLQGYTVEVLRQQPPDLVEFAVEYFTRLREARA

SEQ ID NO: 206922 - protein, 493 aa, Artificial Sequence
  Description of Artificial Sequence: Synthetic Chimeric Antigen Receptor
MALPVTALLLPLALLLHAARPEVQLVQSGAEVKKPGASVKMSCKASGYTFTSYFIHWVRQAPGQGLEWIGFINPYNDGSKYAQKFQGRATLTSDKSTSTVYMELSSLRSEDTAVYYCTRDDGYYGYAMDYWGQGTLVTVSSASGGGGSGGGGSGGGGSDIQMTQSPSSLSASVGDRVTLTCRATQELSGYLSWLQQKPGKAIKRLIYAASTLDSGVPSRFSGNRAGTDYTLTISSLQPEDFATYYCLQYAIYPYTFGQGTKLEIKRTRTTTPAPRPPTPAPTIASQPLSLRPEACRPAAGGAVHTRGLDFACDIYIWAPLAGTCGVLLLSLVITLYCKRGRKKLLYIFKQPFMRPVQTTQEEDGCSCRFPEEEEGGCELSARVKFSRSADAPAYKQGQNQLYNELNLGRREEYDVLDKRRGRDPEMGGKPRRKNPQEGLYNELQKDKMAEAYSEIGMKGERRRGKGHDGLYQGLSTATKDTYDALHMQALPPR

SEQ ID NO: 206923 - protein, 704 aa, Artificial Sequence
  Description of Artificial Sequence: Synthetic Chimeric Antigen Receptor
MVSKGEELFTGVVPILVELDGDVNGHKFSVSGEGEGDATYGKLTLKFICTTGKLPVPWPTLVTTLTYGVQCFSRYPDHMKQHDFFKSAMPEGYVQERTIFFKDDGNYKTRAEVKFEGDTLVNRIELKGIDFKEDGNILGHKLEYNYNSHNVYIMADKQKNGIKVNFKIRHNIEDGSVQLADHYQQNTPIGDGPVLLPDNHYLSTQSALSKDPNEKRDHMVLLEFVTAAGITLGMDELYKSGVKQTLNFDLLKLAGDVESNPGPMALPVTALLLPLALLLHAARPEVKLVESGGGLVKPGGSLKLSCAASGFTFNSYTMSWVRQTPAKRLEWVVTISSGGGRTYYPDSVKGRFTISRDNARNTLYLQMSSLRSEDTAMYYCIRGDYRYDGFAYWGQGTVVTVSTGGGGSGGGGSGGGGSDIQMTQSPASLSASVGETVTITCRASENIDSYLAWYQQKQGKSPQLLVYASTLLVDGVPSRFSGSRSGTQFSLKINSLQSEDVARYYCQHYYSIPYTFGSGTKLEIKTTTPAPRPPTPAPTIASQPLSLRPEACRPAAGGAVHTRGLDFACDIYIWAPLAGTCGVLLLSLVITRVKFSRSADAPAYQQGQNQLYNELNLGRREEYDVLDKRRGRDPEMGGKPQRRKNPQEGLYNELQKDKMAEAYSEIGMKGERRRGKGHDGLYQGLSTATKDTYDALHMQALPPR

SEQ ID NO: 206924 - protein, 793 aa, Artificial Sequence
  Description of Artificial Sequence: Synthetic Chimeric Antigen Receptor
MVSKGEELFTGVVPILVELDGDVNGHKFSVSGEGEGDATYGKLTLKFICTTGKLPVPWPTLVTTLTYGVQCFSRYPDHMKQHDFFKSAMPEGYVQERTIFFKDDGNYKTRAEVKFEGDTLVNRIELKGIDFKEDGNILGHKLEYNYNSHNVYIMADKQKNGIKVNFKIRHNIEDGSVQLADHYQQNTPIGDGPVLLPDNHYLSTQSALSKDPNEKRDHMVLLEFVTAAGITLGMDELYKSGVKQTLNFDLLKLAGDVESNPGPMALPVTALLLPLALLLHAARPEVKLVESGGGLVKPGGSLKLSCAASGFTFNSYTMSWVRQTPAKRLEWVVTISSGGGRTYYPDSVKGRFTISRDNARNTLYLQMSSLRSEDTAMYYCIRGDYRYDGFAYWGQGTVVTVSTGGGGSGGGGSGGGGSDIQMTQSPASLSASVGETVTITCRASENIDSYLAWYQQKQGKSPQLLVYASTLLVDGVPSRFSGSRSGTQFSLKINSLQSEDVARYYCQHYYSIPYTFGSGTKLEIKTTTPAPRPPTPAPTIASQPLSLRPEACRPAAGGAVHTRGLDFACDFWVLVVVGGVLACYSLLVTVAFIIFWVRSKRSRLLHSDYMNMTPRRPGPTRKHYQPYAPPRDFAAYRSKRGRKKLLYIFKQPFMRPVQTTQEEDGCSCRFPEEEEGGCELRVKFSRSADAPAYQQGQNQLYNELNLGRREEYDVLDKRRGRDPEMGGKPQRRKNPQEGLYNELQKDKMAEAYSEIGMKGERRRGKGHDGLYQGLSTATKDTYDALHMQALPPR

SEQ ID NO: 206925 - protein, 453 aa, Artificial Sequence
  Description of Artificial Sequence: Synthetic Chimeric Antigen Receptor
MALPVTALLLPLALLLHAARPEVQLLESGGGLVQPGGSLRLSCAASGFTFSSYAMNWVRQAPGKGLEWVSAISDSGGSRWYADSVKGRFTISRDNSKNTLYLQMNSLRAEDTAVYYCTRYWPMDIWGQGTLVTVSSGGGGSGGGGSGGGGSEIVLTQSPGTLSLSPGERATLSCRASVRVSSTYLAWYQQKPGQAPRLLMYDASIRATGIPDRFSGSGSGTDFTLTISRLEPEDFAVYYCQQYMKWPLTFGQGTKVEIKGLAVSTISSFFPPGYQIYIWAPLAGTCGVLLLSLVITLYCKRGRKKLLYIFKQPFMRPVQTTQEEDGCSCRFPEEEEGGCELRVKFSRSADAPAYQQGQNQLYNELNLGRREEYDVLDKRRGRDPEMGGKPRRKNPQEGLYNELQKDKMAEAYSEIGMKGERRRGKGHDGLYQGLSTATKDTYDALHMQALPPR

SEQ ID NO: 206926 - protein, 455 aa, Artificial Sequence
  Description of Artificial Sequence: Synthetic Chimeric Antigen Receptor
MALPVTALLLPLALLLHAARPQVQLQESGPGLVKPSETLSLTCVVSGGSISSSNWWSWVRQPPGKGLEWIGEIYHSGSPNYNPSLKSRVTISVDKSKNQFSLKLSSVTAADTAVYYCARQTTAGSFDYWGQGTLVTVSSGGGGSGGGGSGGGGSDIQMTQSPSSLSASVGDRVTITCRASQSISSYLNWYQQKPGKAPKLLIYAASSLQSGVPSRFSGSGSGTDFTLTISSLQPEDFATYYCQQSYSTPPTFGQGTKVEIKGLAVSTISSFFPPGYQIYIWAPLAGTCGVLLLSLVITLYCKRGRKKLLYIFKQPFMRPVQTTQEEDGCSCRFPEEEEGGCELRVKFSRSADAPAYQQGQNQLYNELNLGRREEYDVLDKRRGRDPEMGGKPRRKNPQEGLYNELQKDKMAEAYSEIGMKGERRRGKGHDGLYQGLSTATKDTYDALHMQALPPR

SEQ ID NO: 206927 - protein, 456 aa, Artificial Sequence
  Description of Artificial Sequence: Synthetic Chimeric Antigen Receptor
MALPVTALLLPLALLLHAARPQVQLQQPGAELVKPGTSVKLSCKASGYTFTRYWMHWVKQRPGQGLEWIGMIHPSSGSTSYNEKVKNKATLTVDRSSTTAYMQLSSLTSEDSAVYYCARDGDYYYGTGDYWGQGTTLTVSSGGGGSGGGGSGGGGSQIVLSQSPAILSASPGEKVTMTCRASSSINYMHWYQQKPGSSPKPWIFATSNLASGVPSRFSGSGSGTSYSLTISRVEAEDAATYYCQQWRSDRALTFGAGTKLELGLAVSTISSFFPPGYQIYIWAPLAGTCGVLLLSLVITLYCKRGRKKLLYIFKQPFMRPVQTTQEEDGCSCRFPEEEEGGCELRVKFSRSADAPAYQQGQNQLYNELNLGRREEYDVLDKRRGRDPEMGGKPRRKNPQEGLYNELQKDKMAEAYSEIGMKGERRRGKGHDGLYQGLSTATKDTYDALHMQALPPR

SEQ ID NO: 206928 - protein, 457 aa, Artificial Sequence
  Description of Artificial Sequence: Synthetic Chimeric Antigen Receptor
MALPVTALLLPLALLLHAARPEVQLQQSGAELVRPGASVKLSCTASGFNIKDDYIHWVKQRPEQGLEWIGWIDPEKGDTAYASKFQDKATITSDTSSNTAYLQLSSLTSEDTAVYYCTLTGRFDYWGQGTTLTVSSGGGGSGGGGSGGGGSDIVMSQSPSSLAVSVGEKVTMSCKSSQSLLYSSNQKNNLAWYQQKPGQSPKLLIYWASTRESGVPDRFTGSGSGTDFTLTISSVQAEDLAVYYCQQYYSYRTFGGGTKLEIKGLAVSTISSFFPPGYQIYIWAPLAGTCGVLLLSLVITLYCKRGRKKLLYIFKQPFMRPVQTTQEEDGCSCRFPEEEEGGCELRVKFSRSADAPAYQQGQNQLYNELNLGRREEYDVLDKRRGRDPEMGGKPRRKNPQEGLYNELQKDKMAEAYSEIGMKGERRRGKGHDGLYQGLSTATKDTYDALHMQALPPR

SEQ ID NO: 206929 - protein, 457 aa, Artificial Sequence
  Description of Artificial Sequence: Synthetic Chimeric Antigen Receptor
MALPVTALLLPLALLLHAARPEVQLQQSGPELVKPGASVKMSCKASGYIFTSYVMYWVKQKPGQGLEWIGYINPYNDGTKYNEKFKGKATLTSDKSSSTAYMELSSLTSEDSAVYYSCCARYYDYDYYFDYWGQGTTLTVSSGGGGSGGGGSGGGGSDIQMTQSPSSLSASLGGKVTITCKASQDINKYIAWYQHKPGKGPRLLIHYTSTLQPGIPSRFSGSGSGRDYSFSISNLEPEDIATYYCLQYDYLWTFGGGTKLEIKGLAVSTISSFFPPGYQIYIWAPLAGTCGVLLLSLVITLYCKRGRKKLLYIFKQPFMRPVQTTQEEDGCSCRFPEEEEGGCELRVKFSRSADAPAYQQGQNQLYNELNLGRREEYDVLDKRRGRDPEMGGKPRRKNPQEGLYNELQKDKMAEAYSEIGMKGERRRGKGHDGLYQGLSTATKDTYDALHMQALPPR

SEQ ID NO: 206930 - protein, 458 aa, Artificial Sequence
  Description of Artificial Sequence: Synthetic Chimeric Antigen Receptor
MALPVTALLLPLALLLHAARPEVQLQQSGPELVKPGASVKMSCKASGYTFTSYFIHWVKQKPGQGLEWIGFINPYNDGSKYNEKFKGKATLTSDKSSSTAYMELSSLTSEDSAVYYCTRDDGYYGYAMDYWGQGTSVTVSSGGGGSGGGGSGGGGSDIQMTQSPSSLSASLGERVSLTCRATQELSGYLSWLQQKPDGTIKRLIYAASTLDSGVPKRFSGNRSGSDYSLTISSLESEDFADYYCLQYAIYPYTFGGGTKLEIKRGLAVSTISSFFPPGYQIYIWAPLAGTCGVLLLSLVITLYCKRGRKKLLYIFKQPFMRPVQTTQEEDGCSCRFPEEEEGGCELRVKFSRSADAPAYQQGQNQLYNELNLGRREEYDVLDKRRGRDPEMGGKPRRKNPQEGLYNELQKDKMAEAYSEIGMKGERRRGKGHDGLYQGLSTATKDTYDALHMQALPPR

SEQ ID NO: 206931 - protein, 458 aa, Artificial Sequence
  Description of Artificial Sequence: Synthetic Chimeric Antigen Receptor
MALPVTALLLPLALLLHAARPEVQLRQSGPELVKPGASVKMSCKASGYTFTSYFMHWVKQKPGQGLEWIGFINPYNDGTKYNEKFKGKATLTSDKSSSTAYMELNSLTSEDSAVYYCTRDDGYYDYAMDYWGQGTSVTVSSGGGGSGGGGSGGGGSDIQMTQSPSSLSASLGERVSLTCRASQEISVYLSWLQQKPDGTIKRLIYAASTLDSGVPERFSGSRSGSDYSLTISSLESEDFADYYCLQYASYPYTFGGGTKLEIKRGLAVSTISSFFPPGYQIYIWAPLAGTCGVLLLSLVITLYCKRGRKKLLYIFKQPFMRPVQTTQEEDGCSCRFPEEEEGGCELRVKFSRSADAPAYQQGQNQLYNELNLGRREEYDVLDKRRGRDPEMGGKPRRKNPQEGLYNELQKDKMAEAYSEIGMKGERRRGKGHDGLYQGLSTATKDTYDALHMQALPPR

SEQ ID NO: 206932 - protein, 458 aa, Artificial Sequence
  Description of Artificial Sequence: Synthetic Chimeric Antigen Receptor
MALPVTALLLPLALLLHAARPQVQLQESGPGLVKPSETLSLTCVVSGGSISSSNWWSWVRQPPGKGLEWIGEIYHSGSPNYNPSLKSRVTISVDKSKNQFSLKLSSVTAADTAVYYCARQTTAGSFDYWGQGTLVTVSSGGGGSGGGGSGGGGSDIQMTQSPSSLSASVGDRVTITCRASQSISSYLNWYQQKPGKAPKLLIYAASSLQSGVPSRFSGSGSGTDFTLTISSLQPEDFATYYCQQSYSTPPTFGQGTKVEIKGLAVSTISSFFPPGYQIISFFLALTSTALLFLLFFLTLRFSVVKRGRKKLLYIFKQPFMRPVQTTQEEDGCSCRFPEEEEGGCELRVKFSRSADAPAYQQGQNQLYNELNLGRREEYDVLDKRRGRDPEMGGKPRRKNPQEGLYNELQKDKMAEAYSEIGMKGERRRGKGHDGLYQGLSTATKDTYDALHMQALPPR

SEQ ID NO: 206933 - protein, 458 aa, Artificial Sequence
  Description of Artificial Sequence: Synthetic Chimeric Antigen Receptor
MALPVTALLLPLALLLHAARPQVQLQESGPGLVKPSETLSLTCVVSGGSISSSNWWSWVRQPPGKGLEWIGEIYHSGSPNYNPSLKSRVTISVDKSKNQFSLKLSSVTAADTAVYYCARSSSGGFFDYWGQGTLVTVSSGGGGSGGGGSGGGGSDIQMTQSPSSLSASVGDRVTITCRASQSISSYLNWYQQKPGKAPKLLIYAASSLQSGVPSRFSGSGSGTDFTLTISSLQPEDFATYYCQQSYSTPPTFGQGTKVEIKGLAVSTISSFFPPGYQIISFFLALTSTALLFLLFFLTLRFSVVKRGRKKLLYIFKQPFMRPVQTTQEEDGCSCRFPEEEEGGCELRVKFSRSADAPAYQQGQNQLYNELNLGRREEYDVLDKRRGRDPEMGGKPRRKNPQEGLYNELQKDKMAEAYSEIGMKGERRRGKGHDGLYQGLSTATKDTYDALHMQALPPR

SEQ ID NO: 206934 - protein, 459 aa, Artificial Sequence
  Description of Artificial Sequence: Synthetic Chimeric Antigen Receptor
MALPVTALLLPLALLLHAARPEVQLQQSGPELVKPGASMKISCKASGYSFTGYTMNWVKQSHEKNLEWIGPINPYNDGTIYNPNFKGKATLTVDKASSTAYMELLSLTSDDPAVYYSCCARTDDYDDYTMDYWGQGTSVTVSSGGGGSGGGGSGGGGSEIQMTQTPSSLSASLGDRVTISCRASHDISNYLNWYQQKPDGTLKLLIYYTSRLHSGVPSRFSGSGSGTDYSLTISNLEQEDIATYFCQQGKTLLWTFGGGTKLEIKGLAVSTISSFFPPGYQIYIWAPLAGTCGVLLLSLVITLYCKRGRKKLLYIFKQPFMRPVQTTQEEDGCSCRFPEEEEGGCELRVKFSRSADAPAYQQGQNQLYNELNLGRREEYDVLDKRRGRDPEMGGKPRRKNPQEGLYNELQKDKMAEAYSEIGMKGERRRGKGHDGLYQGLSTATKDTYDALHMQALPPR

SEQ ID NO: 206935 - protein, 459 aa, Artificial Sequence
  Description of Artificial Sequence: Synthetic Chimeric Antigen Receptor
MALPVTALLLPLALLLHAARPQVQLQQPGAELVKPGTSVKLSCKASGYTFTRYWMHWVKQRPGQGLEWIGMIHPSSGSTSYNEKVKNKATLTVDRSSTTAYMQLSSLTSEDSAVYYCARDGDYYYGTGDYWGQGTTLTVSSGGGGSGGGGSGGGGSQIVLSQSPAILSASPGEKVTMTCRASSSINYMHWYQQKPGSSPKPWIFATSNLASGVPSRFSGSGSGTSYSLTISRVEAEDAATYYCQQWRSDRALTFGAGTKLELGLAVSTISSFFPPGYQIISFFLALTSTALLFLLFFLTLRFSVVKRGRKKLLYIFKQPFMRPVQTTQEEDGCSCRFPEEEEGGCELRVKFSRSADAPAYQQGQNQLYNELNLGRREEYDVLDKRRGRDPEMGGKPRRKNPQEGLYNELQKDKMAEAYSEIGMKGERRRGKGHDGLYQGLSTATKDTYDALHMQALPPR

SEQ ID NO: 206936 - protein, 460 aa, Artificial Sequence
  Description of Artificial Sequence: Synthetic Chimeric Antigen Receptor
MALPVTALLLPLALLLHAARPDIQLQESGPGLVKPSQSLSLTCSVTGYSITSAYYWNWIRQFPGNKLEWMGYISYDGRNNYNPSLKNRISITRDTSKNQFFLKLNSVTTEDTATYYCAKEGDYDVGNYYAMDYWGQGTSVTVSSGGGGSGGGGSGGGGSENVLTQSPAIMSASPGEKVTMTCRASSNVISSYVHWYQQRSGASPKLWIYSTSNLASGVPARFSGSGSGTSYSLTISSVEAEDAATYYCQQYSGYPLTFGAGTKLELGLAVSTISSFFPPGYQIYIWAPLAGTCGVLLLSLVITLYCKRGRKKLLYIFKQPFMRPVQTTQEEDGCSCRFPEEEEGGCELRVKFSRSADAPAYQQGQNQLYNELNLGRREEYDVLDKRRGRDPEMGGKPRRKNPQEGLYNELQKDKMAEAYSEIGMKGERRRGKGHDGLYQGLSTATKDTYDALHMQALPPR

SEQ ID NO: 206937 - protein, 460 aa, Artificial Sequence
  Description of Artificial Sequence: Synthetic Chimeric Antigen Receptor
MALPVTALLLPLALLLHAARPEVQLQQSGAELVRPGASVKLSCTASGFNIKDDYIHWVKQRPEQGLEWIGWIDPEKGDTAYASKFQDKATITSDTSSNTAYLQLSSLTSEDTAVYYCTLTGRFDYWGQGTTLTVSSGGGGSGGGGSGGGGSDIVMSQSPSSLAVSVGEKVTMSCKSSQSLLYSSNQKNNLAWYQQKPGQSPKLLIYWASTRESGVPDRFTGSGSGTDFTLTISSVQAEDLAVYYCQQYYSYRTFGGGTKLEIKGLAVSTISSFFPPGYQIISFFLALTSTALLFLLFFLTLRFSVVKRGRKKLLYIFKQPFMRPVQTTQEEDGCSCRFPEEEEGGCELRVKFSRSADAPAYQQGQNQLYNELNLGRREEYDVLDKRRGRDPEMGGKPRRKNPQEGLYNELQKDKMAEAYSEIGMKGERRRGKGHDGLYQGLSTATKDTYDALHMQALPPR

SEQ ID NO: 206938 - protein, 460 aa, Artificial Sequence
  Description of Artificial Sequence: Synthetic Chimeric Antigen Receptor
MALPVTALLLPLALLLHAARPEVQLQQSGPELVKPGASVKMSCKASGYIFTSYVMYWVKQKPGQGLEWIGYINPYNDGTKYNEKFKGKATLTSDKSSSTAYMELSSLTSEDSAVYYSCCARYYDYDYYFDYWGQGTTLTVSSGGGGSGGGGSGGGGSDIQMTQSPSSLSASLGGKVTITCKASQDINKYIAWYQHKPGKGPRLLIHYTSTLQPGIPSRFSGSGSGRDYSFSISNLEPEDIATYYCLQYDYLWTFGGGTKLEIKGLAVSTISSFFPPGYQIISFFLALTSTALLFLLFFLTLRFSVVKRGRKKLLYIFKQPFMRPVQTTQEEDGCSCRFPEEEEGGCELRVKFSRSADAPAYQQGQNQLYNELNLGRREEYDVLDKRRGRDPEMGGKPRRKNPQEGLYNELQKDKMAEAYSEIGMKGERRRGKGHDGLYQGLSTATKDTYDALHMQALPPR

SEQ ID NO: 206939 - protein, 461 aa, Artificial Sequence
  Description of Artificial Sequence: Synthetic Chimeric Antigen Receptor
MALPVTALLLPLALLLHAARPEVQLQQSGPELVKPGASVKMSCKASGYTFTSYFIHWVKQKPGQGLEWIGFINPYNDGSKYNEKFKGKATLTSDKSSSTAYMELSSLTSEDSAVYYCTRDDGYYGYAMDYWGQGTSVTVSSGGGGSGGGGSGGGGSDIQMTQSPSSLSASLGERVSLTCRATQELSGYLSWLQQKPDGTIKRLIYAASTLDSGVPKRFSGNRSGSDYSLTISSLESEDFADYYCLQYAIYPYTFGGGTKLEIKRGLAVSTISSFFPPGYQIISFFLALTSTALLFLLFFLTLRFSVVKRGRKKLLYIFKQPFMRPVQTTQEEDGCSCRFPEEEEGGCELRVKFSRSADAPAYQQGQNQLYNELNLGRREEYDVLDKRRGRDPEMGGKPRRKNPQEGLYNELQKDKMAEAYSEIGMKGERRRGKGHDGLYQGLSTATKDTYDALHMQALPPR

SEQ ID NO: 206940 - protein, 461 aa, Artificial Sequence
  Description of Artificial Sequence: Synthetic Chimeric Antigen Receptor
MALPVTALLLPLALLLHAARPEVQLRQSGPELVKPGASVKMSCKASGYTFTSYFMHWVKQKPGQGLEWIGFINPYNDGTKYNEKFKGKATLTSDKSSSTAYMELNSLTSEDSAVYYCTRDDGYYDYAMDYWGQGTSVTVSSGGGGSGGGGSGGGGSDIQMTQSPSSLSASLGERVSLTCRASQEISVYLSWLQQKPDGTIKRLIYAASTLDSGVPERFSGSRSGSDYSLTISSLESEDFADYYCLQYASYPYTFGGGTKLEIKRGLAVSTISSFFPPGYQIISFFLALTSTALLFLLFFLTLRFSVVKRGRKKLLYIFKQPFMRPVQTTQEEDGCSCRFPEEEEGGCELRVKFSRSADAPAYQQGQNQLYNELNLGRREEYDVLDKRRGRDPEMGGKPRRKNPQEGLYNELQKDKMAEAYSEIGMKGERRRGKGHDGLYQGLSTATKDTYDALHMQALPPR

SEQ ID NO: 206941 - protein, 461 aa, Artificial Sequence
  Description of Artificial Sequence: Synthetic Chimeric Antigen Receptor
MALPVTALLLPLALLLHAARPQVQLQQPGAELVKPGASMKMSCKASGYTFPSSNIHWLKQTPGQGLEWIGVIYPGNGDTSYNQKFKDKATLTTDKSSSTAYMQLSSLTSEDSAIYFSCCARVYNWHFDVWGAGTTVTVSSGGGGSGGGGSGGGGSNIVLTQSPASLAVSLGQRATISCRASESVDGYGDIFMLWYQQKPGQPPKLLIYFASNLESGVPARFSGSGSRTDFTLTIDPVEADDAATYYCQQNNEDPYTFGGGTKLEIKRGLAVSTISSFFPPGYQIYIWAPLAGTCGVLLLSLVITLYCKRGRKKLLYIFKQPFMRPVQTTQEEDGCSCRFPEEEEGGCELRVKFSRSADAPAYQQGQNQLYNELNLGRREEYDVLDKRRGRDPEMGGKPRRKNPQEGLYNELQKDKMAEAYSEIGMKGERRRGKGHDGLYQGLSTATKDTYDALHMQALPPR

SEQ ID NO: 206942 - protein, 462 aa, Artificial Sequence
  Description of Artificial Sequence: Synthetic Chimeric Antigen Receptor
MALPVTALLLPLALLLHAARPEVQLQQSGPELVKPGASMKISCKASGYSFTGYTMNWVKQSHEKNLEWIGPINPYNDGTIYNPNFKGKATLTVDKASSTAYMELLSLTSDDPAVYYSCCARTDDYDDYTMDYWGQGTSVTVSSGGGGSGGGGSGGGGSEIQMTQTPSSLSASLGDRVTISCRASHDISNYLNWYQQKPDGTLKLLIYYTSRLHSGVPSRFSGSGSGTDYSLTISNLEQEDIATYFCQQGKTLLWTFGGGTKLEIKGLAVSTISSFFPPGYQIISFFLALTSTALLFLLFFLTLRFSVVKRGRKKLLYIFKQPFMRPVQTTQEEDGCSCRFPEEEEGGCELRVKFSRSADAPAYQQGQNQLYNELNLGRREEYDVLDKRRGRDPEMGGKPRRKNPQEGLYNELQKDKMAEAYSEIGMKGERRRGKGHDGLYQGLSTATKDTYDALHMQALPPR

SEQ ID NO: 206943 - protein, 463 aa, Artificial Sequence
  Description of Artificial Sequence: Synthetic Chimeric Antigen Receptor
MALPVTALLLPLALLLHAARPDIQLQESGPGLVKPSQSLSLTCSVTGYSITSAYYWNWIRQFPGNKLEWMGYISYDGRNNYNPSLKNRISITRDTSKNQFFLKLNSVTTEDTATYYCAKEGDYDVGNYYAMDYWGQGTSVTVSSGGGGSGGGGSGGGGSENVLTQSPAIMSASPGEKVTMTCRASSNVISSYVHWYQQRSGASPKLWIYSTSNLASGVPARFSGSGSGTSYSLTISSVEAEDAATYYCQQYSGYPLTFGAGTKLELGLAVSTISSFFPPGYQIISFFLALTSTALLFLLFFLTLRFSVVKRGRKKLLYIFKQPFMRPVQTTQEEDGCSCRFPEEEEGGCELRVKFSRSADAPAYQQGQNQLYNELNLGRREEYDVLDKRRGRDPEMGGKPRRKNPQEGLYNELQKDKMAEAYSEIGMKGERRRGKGHDGLYQGLSTATKDTYDALHMQALPPR

SEQ ID NO: 206944 - protein, 463 aa, Artificial Sequence
  Description of Artificial Sequence: Synthetic Chimeric Antigen Receptor
MALPVTALLLPLALLLHAARPEVQLQQSGPELVKPGASVKMSCKASGYTFTSYVMHWVKQKPGQGLEWIGYINPYNDGTKYNEKFKGKATLTSDTSSSTAYMELNSLTSEDSAVYFSCCARPIYFDNDYFDYWGQGTTLKVSSGGGGSGGGGSGGGGSTIVLTQSPASLAVSLGQRATISCRASESVDSYGNSFMHWYQQKPGQPPKLLIYLASNLESGVPARFSGSGSRTDFTLTIDPVEADDAATYYCQQNNYDPWTFGGGTKLEIKGLAVSTISSFFPPGYQIYIWAPLAGTCGVLLLSLVITLYCKRGRKKLLYIFKQPFMRPVQTTQEEDGCSCRFPEEEEGGCELRVKFSRSADAPAYQQGQNQLYNELNLGRREEYDVLDKRRGRDPEMGGKPRRKNPQEGLYNELQKDKMAEAYSEIGMKGERRRGKGHDGLYQGLSTATKDTYDALHMQALPPR

SEQ ID NO: 206945 - protein, 464 aa, Artificial Sequence
  Description of Artificial Sequence: Synthetic Chimeric Antigen Receptor
MALPVTALLLPLALLLHAARPQVQLQQPGAELVKPGASMKMSCKASGYTFPSSNIHWLKQTPGQGLEWIGVIYPGNGDTSYNQKFKDKATLTTDKSSSTAYMQLSSLTSEDSAIYFSCCARVYNWHFDVWGAGTTVTVSSGGGGSGGGGSGGGGSNIVLTQSPASLAVSLGQRATISCRASESVDGYGDIFMLWYQQKPGQPPKLLIYFASNLESGVPARFSGSGSRTDFTLTIDPVEADDAATYYCQQNNEDPYTFGGGTKLEIKRGLAVSTISSFFPPGYQIISFFLALTSTALLFLLFFLTLRFSVVKRGRKKLLYIFKQPFMRPVQTTQEEDGCSCRFPEEEEGGCELRVKFSRSADAPAYQQGQNQLYNELNLGRREEYDVLDKRRGRDPEMGGKPRRKNPQEGLYNELQKDKMAEAYSEIGMKGERRRGKGHDGLYQGLSTATKDTYDALHMQALPPR

SEQ ID NO: 206946 - protein, 464 aa, Artificial Sequence
  Description of Artificial Sequence: Synthetic Chimeric Antigen Receptor
MALPVTALLLPLALLLHAARPQVQLQQPGAELVKPGASVKLSCKASGYTFTRYWMHWVKQRPGQGLEWIGNIDPSDTETHYNQQFKDKATLTVDKSSSTAYMQLSSLTSEDSAVYYCAIYYGNPSYYAMDYWGQGTSVTVSSGGGGSGGGGSGGGGSDIVMTQSPSSLTVTAGEKVTMSCKSSQNLLNSGNQKKYLNWYQQKPGQPPKLLIYWASTRESGVPDRFTGSGSGTDFTLTISSVQAEDLAVYFCQNDYSYPFTFGAGTKLELKGLAVSTISSFFPPGYQIYIWAPLAGTCGVLLLSLVITLYCKRGRKKLLYIFKQPFMRPVQTTQEEDGCSCRFPEEEEGGCELRVKFSRSADAPAYQQGQNQLYNELNLGRREEYDVLDKRRGRDPEMGGKPRRKNPQEGLYNELQKDKMAEAYSEIGMKGERRRGKGHDGLYQGLSTATKDTYDALHMQALPPR

SEQ ID NO: 206947 - protein, 466 aa, Artificial Sequence
  Description of Artificial Sequence: Synthetic Chimeric Antigen Receptor
MALPVTALLLPLALLLHAARPEVQLQQSGPELVKPGASVKMSCKASGYTFTSYVMHWVKQKPGQGLEWIGYINPYNDGTKYNEKFKGKATLTSDTSSSTAYMELNSLTSEDSAVYFSCCARPIYFDNDYFDYWGQGTTLKVSSGGGGSGGGGSGGGGSTIVLTQSPASLAVSLGQRATISCRASESVDSYGNSFMHWYQQKPGQPPKLLIYLASNLESGVPARFSGSGSRTDFTLTIDPVEADDAATYYCQQNNYDPWTFGGGTKLEIKGLAVSTISSFFPPGYQIISFFLALTSTALLFLLFFLTLRFSVVKRGRKKLLYIFKQPFMRPVQTTQEEDGCSCRFPEEEEGGCELRVKFSRSADAPAYQQGQNQLYNELNLGRREEYDVLDKRRGRDPEMGGKPRRKNPQEGLYNELQKDKMAEAYSEIGMKGERRRGKGHDGLYQGLSTATKDTYDALHMQALPPR

SEQ ID NO: 206948 - protein, 467 aa, Artificial Sequence
  Description of Artificial Sequence: Synthetic Chimeric Antigen Receptor
MALPVTALLLPLALLLHAARPQVQLQQPGAELVKPGASVKLSCKASGYTFTRYWMHWVKQRPGQGLEWIGNIDPSDTETHYNQQFKDKATLTVDKSSSTAYMQLSSLTSEDSAVYYCAIYYGNPSYYAMDYWGQGTSVTVSSGGGGSGGGGSGGGGSDIVMTQSPSSLTVTAGEKVTMSCKSSQNLLNSGNQKKYLNWYQQKPGQPPKLLIYWASTRESGVPDRFTGSGSGTDFTLTISSVQAEDLAVYFCQNDYSYPFTFGAGTKLELKGLAVSTISSFFPPGYQIISFFLALTSTALLFLLFFLTLRFSVVKRGRKKLLYIFKQPFMRPVQTTQEEDGCSCRFPEEEEGGCELRVKFSRSADAPAYQQGQNQLYNELNLGRREEYDVLDKRRGRDPEMGGKPRRKNPQEGLYNELQKDKMAEAYSEIGMKGERRRGKGHDGLYQGLSTATKDTYDALHMQALPPR

SEQ ID NO: 206949 - protein, 483 aa, Artificial Sequence
  Description of Artificial Sequence: Synthetic Chimeric Antigen Receptor
MALPVTALLLPLALLLHAARPQVNLRESGGGLVQPGGSLRLSCAASGFTFSSYEMNWVRQAPGKGLEWVSYISSSGSTIYYADSVKGRFTISRDNAKNSLYLQMNSLRAEDTAVYYCAREALGSSWEWGQGTTVTVSSGGGGSGGGGSGGGGSDIQMTQSPSSLSASVGDRVTITCQASQDISNYLNWYQQKPGKAPKLLIYDASNLETGVPSRFSGSGSGTDFTFTISSLQPEDIATYYCQQYDNLPLTFGGGTKLEIKTTTPAPRPPTPAPTIASQPLSLRPEACRPAAGGAVHTRGLDFACDIYIWAPLAGTCGVLLLSLVITLYCKRGRKKLLYIFKQPFMRPVQTTQEEDGCSCRFPEEEEGGCELRVKFSRSADAPAYKQGQNQLYNELNLGRREEYDVLDKRRGRDPEMGGKPRRKNPQEGLYNELQKDKMAEAYSEIGMKGERRRGKGHDGLYQGLSTATKDTYDALHMQALPPR

SEQ ID NO: 206950 - protein, 483 aa, Artificial Sequence
  Description of Artificial Sequence: Synthetic Chimeric Antigen Receptor
MALPVTALLLPLALLLHAARPQVQLVESGGGLVQPGGSLRLSCAASGFTFSSYWMSWVRQAPGKGLEWVANINEDGSAKFYVDSVKGRFTISRDNAKNSLYLQMNSLRAEDTAVYFCARDLRSGRYWGQGTLVTVSSGGGGSGGGGSGGGGSEIVLTQSPGTLSLSPGGRATLSCRASQSISGSFLAWYQQKPGQAPRLLIYGASSRATGIPDRFSGSGSGTDFTLTISRLEPEDFAVYYCQQYGSSPPTFGLGTKLEIKTTTPAPRPPTPAPTIASQPLSLRPEACRPAAGGAVHTRGLDFACDIYIWAPLAGTCGVLLLSLVITLYCKRGRKKLLYIFKQPFMRPVQTTQEEDGCSCRFPEEEEGGCELRVKFSRSADAPAYKQGQNQLYNELNLGRREEYDVLDKRRGRDPEMGGKPRRKNPQEGLYNELQKDKMAEAYSEIGMKGERRRGKGHDGLYQGLSTATKDTYDALHMQALPPR

SEQ ID NO: 206951 - protein, 484 aa, Artificial Sequence
  Description of Artificial Sequence: Synthetic Chimeric Antigen Receptor
MALPVTALLLPLALLLHAARPQVQLQESGPGLVKPSETLSLTCVVSGGSISSSNWWSWVRQPPGKGLEWIGEIYHSGSPNYNPSLKSRVTISVDKSKNQFSLKLSSVTAADTAVYYCARQTTAGSFDYWGQGTLVTVSSGGGGSGGGGSGGGGSDIQMTQSPSSLSASVGDRVTITCRASQSISSYLNWYQQKPGKAPKLLIYAASSLQSGVPSRFSGSGSGTDFTLTISSLQPEDFATYYCQQSYSTPPTFGQGTKVEIKTTTPAPRPPTPAPTIASQPLSLRPEACRPAAGGAVHTRGLDFACDIYIWAPLAGTCGVLLLSLVITLYCKRGRKKLLYIFKQPFMRPVQTTQEEDGCSCRFPEEEEGGCELRVKFSRSADAPAYQQGQNQLYNELNLGRREEYDVLDKRRGRDPEMGGKPRRKNPQEGLYNELQKDKMAEAYSEIGMKGERRRGKGHDGLYQGLSTATKDTYDALHMQALPPR

SEQ ID NO: 206952 - protein, 484 aa, Artificial Sequence
  Description of Artificial Sequence: Synthetic Chimeric Antigen Receptor
MALPVTALLLPLALLLHAARPQVQLQESGPGLVKPSETLSLTCVVSGGSISSSNWWSWVRQPPGKGLEWIGEIYHSGSPNYNPSLKSRVTISVDKSKNQFSLKLSSVTAADTAVYYCARSSSGGFFDYWGQGTLVTVSSGGGGSGGGGSGGGGSDIQMTQSPSSLSASVGDRVTITCRASQSISSYLNWYQQKPGKAPKLLIYAASSLQSGVPSRFSGSGSGTDFTLTISSLQPEDFATYYCQQSYSTPPTFGQGTKVEIKTTTPAPRPPTPAPTIASQPLSLRPEACRPAAGGAVHTRGLDFACDIYIWAPLAGTCGVLLLSLVITLYCKRGRKKLLYIFKQPFMRPVQTTQEEDGCSCRFPEEEEGGCELRVKFSRSADAPAYQQGQNQLYNELNLGRREEYDVLDKRRGRDPEMGGKPRRKNPQEGLYNELQKDKMAEAYSEIGMKGERRRGKGHDGLYQGLSTATKDTYDALHMQALPPR

SEQ ID NO: 206953 - protein, 485 aa, Artificial Sequence
  Description of Artificial Sequence: Synthetic Chimeric Antigen Receptor
MALPVTALLLPLALLLHAARPQVQLQQPGAELVKPGTSVKLSCKASGYTFTRYWMHWVKQRPGQGLEWIGMIHPSSGSTSYNEKVKNKATLTVDRSSTTAYMQLSSLTSEDSAVYYCARDGDYYYGTGDYWGQGTTLTVSSGGGGSGGGGSGGGGSQIVLSQSPAILSASPGEKVTMTCRASSSINYMHWYQQKPGSSPKPWIFATSNLASGVPSRFSGSGSGTSYSLTISRVEAEDAATYYCQQWRSDRALTFGAGTKLELTTTPAPRPPTPAPTIASQPLSLRPEACRPAAGGAVHTRGLDFACDIYIWAPLAGTCGVLLLSLVITLYCKRGRKKLLYIFKQPFMRPVQTTQEEDGCSCRFPEEEEGGCELRVKFSRSADAPAYQQGQNQLYNELNLGRREEYDVLDKRRGRDPEMGGKPRRKNPQEGLYNELQKDKMAEAYSEIGMKGERRRGKGHDGLYQGLSTATKDTYDALHMQALPPR

SEQ ID NO: 206954 - protein, 486 aa, Artificial Sequence
  Description of Artificial Sequence: Synthetic Chimeric Antigen Receptor
MALPVTALLLPLALLLHAARPEVQLQQSGAELVRPGASVKLSCTASGFNIKDDYIHWVKQRPEQGLEWIGWIDPEKGDTAYASKFQDKATITSDTSSNTAYLQLSSLTSEDTAVYYCTLTGRFDYWGQGTTLTVSSGGGGSGGGGSGGGGSDIVMSQSPSSLAVSVGEKVTMSCKSSQSLLYSSNQKNNLAWYQQKPGQSPKLLIYWASTRESGVPDRFTGSGSGTDFTLTISSVQAEDLAVYYCQQYYSYRTFGGGTKLEIKTTTPAPRPPTPAPTIASQPLSLRPEACRPAAGGAVHTRGLDFACDIYIWAPLAGTCGVLLLSLVITLYCKRGRKKLLYIFKQPFMRPVQTTQEEDGCSCRFPEEEEGGCELRVKFSRSADAPAYQQGQNQLYNELNLGRREEYDVLDKRRGRDPEMGGKPRRKNPQEGLYNELQKDKMAEAYSEIGMKGERRRGKGHDGLYQGLSTATKDTYDALHMQALPPR

SEQ ID NO: 206955 - protein, 486 aa, Artificial Sequence
  Description of Artificial Sequence: Synthetic Chimeric Antigen Receptor
MALPVTALLLPLALLLHAARPEVQLQQSGPELVKPGASVKMSCKASGYIFTSYVMYWVKQKPGQGLEWIGYINPYNDGTKYNEKFKGKATLTSDKSSSTAYMELSSLTSEDSAVYYSCCARYYDYDYYFDYWGQGTTLTVSSGGGGSGGGGSGGGGSDIQMTQSPSSLSASLGGKVTITCKASQDINKYIAWYQHKPGKGPRLLIHYTSTLQPGIPSRFSGSGSGRDYSFSISNLEPEDIATYYCLQYDYLWTFGGGTKLEIKTTTPAPRPPTPAPTIASQPLSLRPEACRPAAGGAVHTRGLDFACDIYIWAPLAGTCGVLLLSLVITLYCKRGRKKLLYIFKQPFMRPVQTTQEEDGCSCRFPEEEEGGCELRVKFSRSADAPAYQQGQNQLYNELNLGRREEYDVLDKRRGRDPEMGGKPRRKNPQEGLYNELQKDKMAEAYSEIGMKGERRRGKGHDGLYQGLSTATKDTYDALHMQALPPR

SEQ ID NO: 206956 - protein, 487 aa, Artificial Sequence
  Description of Artificial Sequence: Synthetic Chimeric Antigen Receptor
MALPVTALLLPLALLLHAARPEVQLQQSGPELVKPGASVKMSCKASGYTFTSYFIHWVKQKPGQGLEWIGFINPYNDGSKYNEKFKGKATLTSDKSSSTAYMELSSLTSEDSAVYYCTRDDGYYGYAMDYWGQGTSVTVSSGGGGSGGGGSGGGGSDIQMTQSPSSLSASLGERVSLTCRATQELSGYLSWLQQKPDGTIKRLIYAASTLDSGVPKRFSGNRSGSDYSLTISSLESEDFADYYCLQYAIYPYTFGGGTKLEIKRTTTPAPRPPTPAPTIASQPLSLRPEACRPAAGGAVHTRGLDFACDIYIWAPLAGTCGVLLLSLVITLYCKRGRKKLLYIFKQPFMRPVQTTQEEDGCSCRFPEEEEGGCELRVKFSRSADAPAYQQGQNQLYNELNLGRREEYDVLDKRRGRDPEMGGKPRRKNPQEGLYNELQKDKMAEAYSEIGMKGERRRGKGHDGLYQGLSTATKDTYDALHMQALPPR

SEQ ID NO: 206957 - protein, 487 aa, Artificial Sequence
  Description of Artificial Sequence: Synthetic Chimeric Antigen Receptor
MALPVTALLLPLALLLHAARPEVQLRQSGPELVKPGASVKMSCKASGYTFTSYFMHWVKQKPGQGLEWIGFINPYNDGTKYNEKFKGKATLTSDKSSSTAYMELNSLTSEDSAVYYCTRDDGYYDYAMDYWGQGTSVTVSSGGGGSGGGGSGGGGSDIQMTQSPSSLSASLGERVSLTCRASQEISVYLSWLQQKPDGTIKRLIYAASTLDSGVPERFSGSRSGSDYSLTISSLESEDFADYYCLQYASYPYTFGGGTKLEIKRTTTPAPRPPTPAPTIASQPLSLRPEACRPAAGGAVHTRGLDFACDIYIWAPLAGTCGVLLLSLVITLYCKRGRKKLLYIFKQPFMRPVQTTQEEDGCSCRFPEEEEGGCELRVKFSRSADAPAYQQGQNQLYNELNLGRREEYDVLDKRRGRDPEMGGKPRRKNPQEGLYNELQKDKMAEAYSEIGMKGERRRGKGHDGLYQGLSTATKDTYDALHMQALPPR

SEQ ID NO: 206958 - protein, 487 aa, Artificial Sequence
  Description of Artificial Sequence: Synthetic Chimeric Antigen Receptor
MALPVTALLLPLALLLHAARPQVQLQESGPGLVKPSETLSLTCVVSGGSISSSNWWSWVRQPPGKGLEWIGEIYHSGSPNYNPSLKSRVTISVDKSKNQFSLKLSSVTAADTAVYYCARQTTAGSFDYWGQGTLVTVSSGGGGSGGGGSGGGGSDIQMTQSPSSLSASVGDRVTITCRASQSISSYLNWYQQKPGKAPKLLIYAASSLQSGVPSRFSGSGSGTDFTLTISSLQPEDFATYYCQQSYSTPPTFGQGTKVEIKTTTPAPRPPTPAPTIASQPLSLRPEACRPAAGGAVHTRGLDFACDIISFFLALTSTALLFLLFFLTLRFSVVKRGRKKLLYIFKQPFMRPVQTTQEEDGCSCRFPEEEEGGCELRVKFSRSADAPAYQQGQNQLYNELNLGRREEYDVLDKRRGRDPEMGGKPRRKNPQEGLYNELQKDKMAEAYSEIGMKGERRRGKGHDGLYQGLSTATKDTYDALHMQALPPR

SEQ ID NO: 206959 - protein, 487 aa, Artificial Sequence
  Description of Artificial Sequence: Synthetic Chimeric Antigen Receptor
MALPVTALLLPLALLLHAARPQVQLQESGPGLVKPSETLSLTCVVSGGSISSSNWWSWVRQPPGKGLEWIGEIYHSGSPNYNPSLKSRVTISVDKSKNQFSLKLSSVTAADTAVYYCARSSSGGFFDYWGQGTLVTVSSGGGGSGGGGSGGGGSDIQMTQSPSSLSASVGDRVTITCRASQSISSYLNWYQQKPGKAPKLLIYAASSLQSGVPSRFSGSGSGTDFTLTISSLQPEDFATYYCQQSYSTPPTFGQGTKVEIKTTTPAPRPPTPAPTIASQPLSLRPEACRPAAGGAVHTRGLDFACDIISFFLALTSTALLFLLFFLTLRFSVVKRGRKKLLYIFKQPFMRPVQTTQEEDGCSCRFPEEEEGGCELRVKFSRSADAPAYQQGQNQLYNELNLGRREEYDVLDKRRGRDPEMGGKPRRKNPQEGLYNELQKDKMAEAYSEIGMKGERRRGKGHDGLYQGLSTATKDTYDALHMQALPPR

SEQ ID NO: 206960 - protein, 488 aa, Artificial Sequence
  Description of Artificial Sequence: Synthetic Chimeric Antigen Receptor
MALPVTALLLPLALLLHAARPEVQLQQSGPELVKPGASMKISCKASGYSFTGYTMNWVKQSHEKNLEWIGPINPYNDGTIYNPNFKGKATLTVDKASSTAYMELLSLTSDDPAVYYSCCARTDDYDDYTMDYWGQGTSVTVSSGGGGSGGGGSGGGGSEIQMTQTPSSLSASLGDRVTISCRASHDISNYLNWYQQKPDGTLKLLIYYTSRLHSGVPSRFSGSGSGTDYSLTISNLEQEDIATYFCQQGKTLLWTFGGGTKLEIKTTTPAPRPPTPAPTIASQPLSLRPEACRPAAGGAVHTRGLDFACDIYIWAPLAGTCGVLLLSLVITLYCKRGRKKLLYIFKQPFMRPVQTTQEEDGCSCRFPEEEEGGCELRVKFSRSADAPAYQQGQNQLYNELNLGRREEYDVLDKRRGRDPEMGGKPRRKNPQEGLYNELQKDKMAEAYSEIGMKGERRRGKGHDGLYQGLSTATKDTYDALHMQALPPR

SEQ ID NO: 206961 - protein, 488 aa, Artificial Sequence
  Description of Artificial Sequence: Synthetic Chimeric Antigen Receptor
MALPVTALLLPLALLLHAARPQVQLQQPGAELVKPGTSVKLSCKASGYTFTRYWMHWVKQRPGQGLEWIGMIHPSSGSTSYNEKVKNKATLTVDRSSTTAYMQLSSLTSEDSAVYYCARDGDYYYGTGDYWGQGTTLTVSSGGGGSGGGGSGGGGSQIVLSQSPAILSASPGEKVTMTCRASSSINYMHWYQQKPGSSPKPWIFATSNLASGVPSRFSGSGSGTSYSLTISRVEAEDAATYYCQQWRSDRALTFGAGTKLELTTTPAPRPPTPAPTIASQPLSLRPEACRPAAGGAVHTRGLDFACDIISFFLALTSTALLFLLFFLTLRFSVVKRGRKKLLYIFKQPFMRPVQTTQEEDGCSCRFPEEEEGGCELRVKFSRSADAPAYQQGQNQLYNELNLGRREEYDVLDKRRGRDPEMGGKPRRKNPQEGLYNELQKDKMAEAYSEIGMKGERRRGKGHDGLYQGLSTATKDTYDALHMQALPPR

SEQ ID NO: 206962 - protein, 489 aa, Artificial Sequence
  Description of Artificial Sequence: Synthetic Chimeric Antigen Receptor
MALPVTALLLPLALLLHAARPDIQLQESGPGLVKPSQSLSLTCSVTGYSITSAYYWNWIRQFPGNKLEWMGYISYDGRNNYNPSLKNRISITRDTSKNQFFLKLNSVTTEDTATYYCAKEGDYDVGNYYAMDYWGQGTSVTVSSGGGGSGGGGSGGGGSENVLTQSPAIMSASPGEKVTMTCRASSNVISSYVHWYQQRSGASPKLWIYSTSNLASGVPARFSGSGSGTSYSLTISSVEAEDAATYYCQQYSGYPLTFGAGTKLELTTTPAPRPPTPAPTIASQPLSLRPEACRPAAGGAVHTRGLDFACDIYIWAPLAGTCGVLLLSLVITLYCKRGRKKLLYIFKQPFMRPVQTTQEEDGCSCRFPEEEEGGCELRVKFSRSADAPAYQQGQNQLYNELNLGRREEYDVLDKRRGRDPEMGGKPRRKNPQEGLYNELQKDKMAEAYSEIGMKGERRRGKGHDGLYQGLSTATKDTYDALHMQALPPR

SEQ ID NO: 206963 - protein, 489 aa, Artificial Sequence
  Description of Artificial Sequence: Synthetic Chimeric Antigen Receptor
MALPVTALLLPLALLLHAARPEVQLQQSGAELVRPGASVKLSCTASGFNIKDDYIHWVKQRPEQGLEWIGWIDPEKGDTAYASKFQDKATITSDTSSNTAYLQLSSLTSEDTAVYYCTLTGRFDYWGQGTTLTVSSGGGGSGGGGSGGGGSDIVMSQSPSSLAVSVGEKVTMSCKSSQSLLYSSNQKNNLAWYQQKPGQSPKLLIYWASTRESGVPDRFTGSGSGTDFTLTISSVQAEDLAVYYCQQYYSYRTFGGGTKLEIKTTTPAPRPPTPAPTIASQPLSLRPEACRPAAGGAVHTRGLDFACDIISFFLALTSTALLFLLFFLTLRFSVVKRGRKKLLYIFKQPFMRPVQTTQEEDGCSCRFPEEEEGGCELRVKFSRSADAPAYQQGQNQLYNELNLGRREEYDVLDKRRGRDPEMGGKPRRKNPQEGLYNELQKDKMAEAYSEIGMKGERRRGKGHDGLYQGLSTATKDTYDALHMQALPPR

SEQ ID NO: 206964 - protein, 489 aa, Artificial Sequence
  Description of Artificial Sequence: Synthetic Chimeric Antigen Receptor
MALPVTALLLPLALLLHAARPEVQLQQSGPELVKPGASVKMSCKASGYIFTSYVMYWVKQKPGQGLEWIGYINPYNDGTKYNEKFKGKATLTSDKSSSTAYMELSSLTSEDSAVYYSCCARYYDYDYYFDYWGQGTTLTVSSGGGGSGGGGSGGGGSDIQMTQSPSSLSASLGGKVTITCKASQDINKYIAWYQHKPGKGPRLLIHYTSTLQPGIPSRFSGSGSGRDYSFSISNLEPEDIATYYCLQYDYLWTFGGGTKLEIKTTTPAPRPPTPAPTIASQPLSLRPEACRPAAGGAVHTRGLDFACDIISFFLALTSTALLFLLFFLTLRFSVVKRGRKKLLYIFKQPFMRPVQTTQEEDGCSCRFPEEEEGGCELRVKFSRSADAPAYQQGQNQLYNELNLGRREEYDVLDKRRGRDPEMGGKPRRKNPQEGLYNELQKDKMAEAYSEIGMKGERRRGKGHDGLYQGLSTATKDTYDALHMQALPPR

SEQ ID NO: 206965 - protein, 489 aa, Artificial Sequence
  Description of Artificial Sequence: Synthetic Chimeric Antigen Receptor
MALPVTALLLPLALLLHAARPEVQLQQSGPGLVRPSETLSLTCTVSGGPVRSGSHYWNWIRQPPGRGLEWIGYIYYSGSTNYNPSLENRVTISIDTSNNHFSLKLSSVTAADTALYFCARGTATFDWNFPFDSWGQGTLVTVSSGGGGSGGGGSGSGGSDIQMTQSPSSLSASIGDRVTITCRASQSISSYLNWYQQKPGKAPKLLIYAASSLQSGVPSRFSGSGSGTDFTLTISSLQPEDFATYYCQQSYSTPWTFGQGTKLEIKTTTPAPRPPTPAPTIASQPLSLRPEACRPAAGGAVHTRGLDFACDIYIWAPLAGTCGVLLLSLVITLYCKRGRKKLLYIFKQPFMRPVQTTQEEDGCSCRFPEEEEGGCELRVKFSRSADAPAYKQGQNQLYNELNLGRREEYDVLDKRRGRDPEMGGKPRRKNPQEGLYNELQKDKMAEAYSEIGMKGERRRGKGHDGLYQGLSTATKDTYDALHMQALPPR

SEQ ID NO: 206966 - protein, 489 aa, Artificial Sequence
  Description of Artificial Sequence: Synthetic Chimeric Antigen Receptor
MALPVTALLLPLALLLHAARPEVQLVESGGGLVQPGGSLRLSCAASGFTFSSYEMNWVRQAPGKGLEWVSYISSSGSTIYYADSVKGRFTISRDNAKNSLYLQMNSLRAEDTAVYYCARDPYSSSWHDAFDIWGQGTMVTVSSGGGGSGGGGSGGGGSEIVLTQSPGTLSLSPGERATLSCRASQSVSSSYLAWYQQKPGQAPRLLIYGASSRATGIPDRFSGSGSGTDFTLTISRLEPEDFAVYYCQQYGSSPLTFGGGTKVDIKTTTPAPRPPTPAPTIASQPLSLRPEACRPAAGGAVHTRGLDFACDIYIWAPLAGTCGVLLLSLVITLYCKRGRKKLLYIFKQPFMRPVQTTQEEDGCSCRFPEEEEGGCELRVKFSRSADAPAYKQGQNQLYNELNLGRREEYDVLDKRRGRDPEMGGKPRRKNPQEGLYNELQKDKMAEAYSEIGMKGERRRGKGHDGLYQGLSTATKDTYDALHMQALPPR

SEQ ID NO: 206967 - protein, 489 aa, Artificial Sequence
  Description of Artificial Sequence: Synthetic Chimeric Antigen Receptor
MALPVTALLLPLALLLHAARPEVQLVESGGGVVQPGGSLRLSCAASGFTFDDYAMHWVRQAPGKGLEWVSLISGDGGSTYYADSVKGRFTISRDNSKNTLYLQMNSLRVEDTAVYYCARVFDSYYMDVWGKGTTVTVSSGGGGSGGGGSGSGGSEIVLTQSPLSLPVTPGQPASISCRSSQSLVYTDGNTYLNWFQQRPGQSPRRLIYKVSNRDSGVPDRFSGSGSDTDFTLKISRVEAEDVGIYYCMQGTHWSFTFGQGTRLEIKTTTPAPRPPTPAPTIASQPLSLRPEACRPAAGGAVHTRGLDFACDIYIWAPLAGTCGVLLLSLVITLYCKRGRKKLLYIFKQPFMRPVQTTQEEDGCSCRFPEEEEGGCELRVKFSRSADAPAYKQGQNQLYNELNLGRREEYDVLDKRRGRDPEMGGKPRRKNPQEGLYNELQKDKMAEAYSEIGMKGERRRGKGHDGLYQGLSTATKDTYDALHMQALPPR

SEQ ID NO: 206968 - protein, 490 aa, Artificial Sequence
  Description of Artificial Sequence: Synthetic Chimeric Antigen Receptor
MALPVTALLLPLALLLHAARPEVQLQQSGPELVKPGASVKMSCKASGYTFTSYFIHWVKQKPGQGLEWIGFINPYNDGSKYNEKFKGKATLTSDKSSSTAYMELSSLTSEDSAVYYCTRDDGYYGYAMDYWGQGTSVTVSSGGGGSGGGGSGGGGSDIQMTQSPSSLSASLGERVSLTCRATQELSGYLSWLQQKPDGTIKRLIYAASTLDSGVPKRFSGNRSGSDYSLTISSLESEDFADYYCLQYAIYPYTFGGGTKLEIKRTTTPAPRPPTPAPTIASQPLSLRPEACRPAAGGAVHTRGLDFACDIISFFLALTSTALLFLLFFLTLRFSVVKRGRKKLLYIFKQPFMRPVQTTQEEDGCSCRFPEEEEGGCELRVKFSRSADAPAYQQGQNQLYNELNLGRREEYDVLDKRRGRDPEMGGKPRRKNPQEGLYNELQKDKMAEAYSEIGMKGERRRGKGHDGLYQGLSTATKDTYDALHMQALPPR

SEQ ID NO: 206969 - protein, 490 aa, Artificial Sequence
  Description of Artificial Sequence: Synthetic Chimeric Antigen Receptor
MALPVTALLLPLALLLHAARPEVQLRQSGPELVKPGASVKMSCKASGYTFTSYFMHWVKQKPGQGLEWIGFINPYNDGTKYNEKFKGKATLTSDKSSSTAYMELNSLTSEDSAVYYCTRDDGYYDYAMDYWGQGTSVTVSSGGGGSGGGGSGGGGSDIQMTQSPSSLSASLGERVSLTCRASQEISVYLSWLQQKPDGTIKRLIYAASTLDSGVPERFSGSRSGSDYSLTISSLESEDFADYYCLQYASYPYTFGGGTKLEIKRTTTPAPRPPTPAPTIASQPLSLRPEACRPAAGGAVHTRGLDFACDIISFFLALTSTALLFLLFFLTLRFSVVKRGRKKLLYIFKQPFMRPVQTTQEEDGCSCRFPEEEEGGCELRVKFSRSADAPAYQQGQNQLYNELNLGRREEYDVLDKRRGRDPEMGGKPRRKNPQEGLYNELQKDKMAEAYSEIGMKGERRRGKGHDGLYQGLSTATKDTYDALHMQALPPR

SEQ ID NO: 206970 - protein, 490 aa, Artificial Sequence
  Description of Artificial Sequence: Synthetic Chimeric Antigen Receptor
MALPVTALLLPLALLLHAARPEVQLVQSGGGVVRSGRSLRLSCAASGFTFNSYGLHWVRQAPGKGLEWVALIEYDGSNKYYGDSVKGRFTISRDKSKSTLYLQMDNLRAEDTAVYYCAREGNEDLAFDIWGQGTLVTVSSGGGGSGGGGSGGGGSGGGGSEIVLTQSPSSLSASVGDRVTITCQASQFIKKNLNWYQHKPGKAPKLLIYDASSLQTGVPSRFSGNRSGTTFSFTISSLQPEDVATYYCQQHDNLPLTFGGGTKVEIKTTTPAPRPPTPAPTIASQPLSLRPEACRPAAGGAVHTRGLDFACDIYIWAPLAGTCGVLLLSLVITLYCKRGRKKLLYIFKQPFMRPVQTTQEEDGCSCRFPEEEEGGCELRVKFSRSADAPAYKQGQNQLYNELNLGRREEYDVLDKRRGRDPEMGGKPRRKNPQEGLYNELQKDKMAEAYSEIGMKGERRRGKGHDGLYQGLSTATKDTYDALHMQALPPR

SEQ ID NO: 206971 - protein, 490 aa, Artificial Sequence
  Description of Artificial Sequence: Synthetic Chimeric Antigen Receptor
MALPVTALLLPLALLLHAARPQVQLQQPGAELVKPGASMKMSCKASGYTFPSSNIHWLKQTPGQGLEWIGVIYPGNGDTSYNQKFKDKATLTTDKSSSTAYMQLSSLTSEDSAIYFSCCARVYNWHFDVWGAGTTVTVSSGGGGSGGGGSGGGGSNIVLTQSPASLAVSLGQRATISCRASESVDGYGDIFMLWYQQKPGQPPKLLIYFASNLESGVPARFSGSGSRTDFTLTIDPVEADDAATYYCQQNNEDPYTFGGGTKLEIKRTTTPAPRPPTPAPTIASQPLSLRPEACRPAAGGAVHTRGLDFACDIYIWAPLAGTCGVLLLSLVITLYCKRGRKKLLYIFKQPFMRPVQTTQEEDGCSCRFPEEEEGGCELRVKFSRSADAPAYQQGQNQLYNELNLGRREEYDVLDKRRGRDPEMGGKPRRKNPQEGLYNELQKDKMAEAYSEIGMKGERRRGKGHDGLYQGLSTATKDTYDALHMQALPPR

SEQ ID NO: 206972 - protein, 490 aa, Artificial Sequence
  Description of Artificial Sequence: Synthetic Chimeric Antigen Receptor
MALPVTALLLPLALLLHAARPQVQLVQSGAEVKEPGASVKVSCKAPANTFSDHVMHWVRQAPGQRFEWMGYIHAANGGTHYSQKFQDRVTITRDTSANTVYMDLSSLRSEDTAVYYCARGGYNSDAFDIWGQGTMVTVSSGGGGSGGGGSGGGGSGGGGSDIVMTQSPSSVSASVGDRVTITCRASQDISSWLAWYQQKPGKAPKLLIYAASSLQSGVPSRFNGSGSGTDFTLTISSLQPEDFATYYCQQSYSTPLTFGGGTKVEIKTTTPAPRPPTPAPTIASQPLSLRPEACRPAAGGAVHTRGLDFACDIYIWAPLAGTCGVLLLSLVITLYCKRGRKKLLYIFKQPFMRPVQTTQEEDGCSCRFPEEEEGGCELRVKFSRSADAPAYKQGQNQLYNELNLGRREEYDVLDKRRGRDPEMGGKPRRKNPQEGLYNELQKDKMAEAYSEIGMKGERRRGKGHDGLYQGLSTATKDTYDALHMQALPPR

SEQ ID NO: 206973 - protein, 491 aa, Artificial Sequence
  Description of Artificial Sequence: Synthetic Chimeric Antigen Receptor
MALPVTALLLPLALLLHAARPEVQLQQSGAEVKKPGSSVKVSCKASGGTFSSYAISWVRQAPGQGLEWMGGIIPIFGTANYAQKFQGRVTITADESTSTAYMELSSLRSEDTAVYYCARDLEMATIMGGYWGQGTLVTVSSGGGGSGGGGSGGGGSQSALTQPASVSGSPGQSITISCTGTSSDVGGYNYVSWYQQHPGKAPKLMIYDVSNRPSGVSNRFSGSKSGNTASLTISGLQAEDEADYYCSSYTSSSTLDVVFGGGTKLTVLTTTPAPRPPTPAPTIASQPLSLRPEACRPAAGGAVHTRGLDFACDIYIWAPLAGTCGVLLLSLVITLYCKRGRKKLLYIFKQPFMRPVQTTQEEDGCSCRFPEEEEGGCELRVKFSRSADAPAYKQGQNQLYNELNLGRREEYDVLDKRRGRDPEMGGKPRRKNPQEGLYNELQKDKMAEAYSEIGMKGERRRGKGHDGLYQGLSTATKDTYDALHMQALPPR

SEQ ID NO: 206974 - protein, 491 aa, Artificial Sequence
  Description of Artificial Sequence: Synthetic Chimeric Antigen Receptor
MALPVTALLLPLALLLHAARPEVQLQQSGPELVKPGASMKISCKASGYSFTGYTMNWVKQSHEKNLEWIGPINPYNDGTIYNPNFKGKATLTVDKASSTAYMELLSLTSDDPAVYYSCCARTDDYDDYTMDYWGQGTSVTVSSGGGGSGGGGSGGGGSEIQMTQTPSSLSASLGDRVTISCRASHDISNYLNWYQQKPDGTLKLLIYYTSRLHSGVPSRFSGSGSGTDYSLTISNLEQEDIATYFCQQGKTLLWTFGGGTKLEIKTTTPAPRPPTPAPTIASQPLSLRPEACRPAAGGAVHTRGLDFACDIISFFLALTSTALLFLLFFLTLRFSVVKRGRKKLLYIFKQPFMRPVQTTQEEDGCSCRFPEEEEGGCELRVKFSRSADAPAYQQGQNQLYNELNLGRREEYDVLDKRRGRDPEMGGKPRRKNPQEGLYNELQKDKMAEAYSEIGMKGERRRGKGHDGLYQGLSTATKDTYDALHMQALPPR

SEQ ID NO: 206975 - protein, 491 aa, Artificial Sequence
  Description of Artificial Sequence: Synthetic Chimeric Antigen Receptor
MALPVTALLLPLALLLHAARPQVQLQESGPGLVKPSETLSLTCTVSGGSISSSSYYWGWIRQPPGKGLEWIGSIYYSGSTYYNPSLKSRVSISVDTSKNQFSLKLKYVTAADTAVYYCATPGTYYDFLSGYYPFYWGQGTLVTVSSGGGGSGGGGSGGGGSDIVMTQSPSSLSASVGDRVTITCRASQGISSYLAWYQQKPGKAPKLLIYAASTLQSGVPSRFSGSGSGTDFTLTISSLQPEDFATYYCQQLNSYPYTFGQGTKLEIKTTTPAPRPPTPAPTIASQPLSLRPEACRPAAGGAVHTRGLDFACDIYIWAPLAGTCGVLLLSLVITLYCKRGRKKLLYIFKQPFMRPVQTTQEEDGCSCRFPEEEEGGCELRVKFSRSADAPAYKQGQNQLYNELNLGRREEYDVLDKRRGRDPEMGGKPRRKNPQEGLYNELQKDKMAEAYSEIGMKGERRRGKGHDGLYQGLSTATKDTYDALHMQALPPR

SEQ ID NO: 206976 - protein, 491 aa, Artificial Sequence
  Description of Artificial Sequence: Synthetic Chimeric Antigen Receptor
MALPVTALLLPLALLLHAARPQVQLVQSGAEVKKSGASVKVSCKASGYPFTGYYIQWVRQAPGQGLEWMGWIDPNSGNTGYAQKFQGRVTMTRNTSISTAYMELSSLRSEDTAVYYCASDSYGYYYGMDVWGQGTLVTVSSGGGGSGGGGSGGGGSGGGGSDIQMTQSPSSLSASVGDRVTFTCRASQGISSALAWYQQKPGKPPKLLIYDASSLESGVPSRFSGSGSGTDFTLTISSLQPEDFATYYCQQFNNYPLTFGGGTKVEIKTTTPAPRPPTPAPTIASQPLSLRPEACRPAAGGAVHTRGLDFACDIYIWAPLAGTCGVLLLSLVITLYCKRGRKKLLYIFKQPFMRPVQTTQEEDGCSCRFPEEEEGGCELRVKFSRSADAPAYKQGQNQLYNELNLGRREEYDVLDKRRGRDPEMGGKPRRKNPQEGLYNELQKDKMAEAYSEIGMKGERRRGKGHDGLYQGLSTATKDTYDALHMQALPPR

SEQ ID NO: 206977 - protein, 492 aa, Artificial Sequence
  Description of Artificial Sequence: Synthetic Chimeric Antigen Receptor
MALPVTALLLPLALLLHAARPDIQLQESGPGLVKPSQSLSLTCSVTGYSITSAYYWNWIRQFPGNKLEWMGYISYDGRNNYNPSLKNRISITRDTSKNQFFLKLNSVTTEDTATYYCAKEGDYDVGNYYAMDYWGQGTSVTVSSGGGGSGGGGSGGGGSENVLTQSPAIMSASPGEKVTMTCRASSNVISSYVHWYQQRSGASPKLWIYSTSNLASGVPARFSGSGSGTSYSLTISSVEAEDAATYYCQQYSGYPLTFGAGTKLELTTTPAPRPPTPAPTIASQPLSLRPEACRPAAGGAVHTRGLDFACDIISFFLALTSTALLFLLFFLTLRFSVVKRGRKKLLYIFKQPFMRPVQTTQEEDGCSCRFPEEEEGGCELRVKFSRSADAPAYQQGQNQLYNELNLGRREEYDVLDKRRGRDPEMGGKPRRKNPQEGLYNELQKDKMAEAYSEIGMKGERRRGKGHDGLYQGLSTATKDTYDALHMQALPPR

SEQ ID NO: 206978 - protein, 492 aa, Artificial Sequence
  Description of Artificial Sequence: Synthetic Chimeric Antigen Receptor
MALPVTALLLPLALLLHAARPEVQLQQSGPELVKPGASVKMSCKASGYTFTSYVMHWVKQKPGQGLEWIGYINPYNDGTKYNEKFKGKATLTSDTSSSTAYMELNSLTSEDSAVYFSCCARPIYFDNDYFDYWGQGTTLKVSSGGGGSGGGGSGGGGSTIVLTQSPASLAVSLGQRATISCRASESVDSYGNSFMHWYQQKPGQPPKLLIYLASNLESGVPARFSGSGSRTDFTLTIDPVEADDAATYYCQQNNYDPWTFGGGTKLEIKTTTPAPRPPTPAPTIASQPLSLRPEACRPAAGGAVHTRGLDFACDIYIWAPLAGTCGVLLLSLVITLYCKRGRKKLLYIFKQPFMRPVQTTQEEDGCSCRFPEEEEGGCELRVKFSRSADAPAYQQGQNQLYNELNLGRREEYDVLDKRRGRDPEMGGKPRRKNPQEGLYNELQKDKMAEAYSEIGMKGERRRGKGHDGLYQGLSTATKDTYDALHMQALPPR

SEQ ID NO: 206979 - protein, 492 aa, Artificial Sequence
  Description of Artificial Sequence: Synthetic Chimeric Antigen Receptor
MALPVTALLLPLALLLHAARPQVQLVQSGGGLVQPGGSLRLSCAASGFTFSSYSMNWVRQAPGKGLEWVSYISSSSSTIYYADSVKGRFTISRDNAKNSLYLQMNSLRAEDTAVYYCARDLSVRAIDAFDIWGQGTMVTVSSGGGGSGGGGSGGGGSGGGGSDIVLTQSPSSLSASVGDRVTITCQASQDISNYLNWYQQKPGKAPKLLIYDASNLETGVPSRFSGSGSGTDFTFTISSLQPEDFATYYCQQAYSTPFTFGPGTKVEIKTTTPAPRPPTPAPTIASQPLSLRPEACRPAAGGAVHTRGLDFACDIYIWAPLAGTCGVLLLSLVITLYCKRGRKKLLYIFKQPFMRPVQTTQEEDGCSCRFPEEEEGGCELRVKFSRSADAPAYKQGQNQLYNELNLGRREEYDVLDKRRGRDPEMGGKPRRKNPQEGLYNELQKDKMAEAYSEIGMKGERRRGKGHDGLYQGLSTATKDTYDALHMQALPPR

SEQ ID NO: 206980 - protein, 493 aa, Artificial Sequence
  Description of Artificial Sequence: Synthetic Chimeric Antigen Receptor
MALPVTALLLPLALLLHAARPQVQLQESGAGLLKPSETLSLTCAVYGGSFSGYYWSWIRQPPGKGLEWVGEINHSGSTNYNPSLKSRVTISVDTSKNQFSLKLSSVTAADTAVYYCARGSGLVVYAIRVGSGWFDYWGQGTLVTVSSGGGGSGGGDSGGGGSDIQMTQSPSSLSASVGDRVTITCRASQSISSYLNWYQQKPGKAPKLLMYAASSLQSGVPSRFSGSGSGTDFTLTISSLQPEDFATYYCQQSYSTPPWTFGQGTKVDIKTTTPAPRPPTPAPTIASQPLSLRPEACRPAAGGAVHTRGLDFACDIYIWAPLAGTCGVLLLSLVITLYCKRGRKKLLYIFKQPFMRPVQTTQEEDGCSCRFPEEEEGGCELRVKFSRSADAPAYKQGQNQLYNELNLGRREEYDVLDKRRGRDPEMGGKPRRKNPQEGLYNELQKDKMAEAYSEIGMKGERRRGKGHDGLYQGLSTATKDTYDALHMQALPPR

SEQ ID NO: 206981 - protein, 493 aa, Artificial Sequence
  Description of Artificial Sequence: Synthetic Chimeric Antigen Receptor
MALPVTALLLPLALLLHAARPQVQLQQPGAELVKPGASMKMSCKASGYTFPSSNIHWLKQTPGQGLEWIGVIYPGNGDTSYNQKFKDKATLTTDKSSSTAYMQLSSLTSEDSAIYFSCCARVYNWHFDVWGAGTTVTVSSGGGGSGGGGSGGGGSNIVLTQSPASLAVSLGQRATISCRASESVDGYGDIFMLWYQQKPGQPPKLLIYFASNLESGVPARFSGSGSRTDFTLTIDPVEADDAATYYCQQNNEDPYTFGGGTKLEIKRTTTPAPRPPTPAPTIASQPLSLRPEACRPAAGGAVHTRGLDFACDIISFFLALTSTALLFLLFFLTLRFSVVKRGRKKLLYIFKQPFMRPVQTTQEEDGCSCRFPEEEEGGCELRVKFSRSADAPAYQQGQNQLYNELNLGRREEYDVLDKRRGRDPEMGGKPRRKNPQEGLYNELQKDKMAEAYSEIGMKGERRRGKGHDGLYQGLSTATKDTYDALHMQALPPR

SEQ ID NO: 206982 - protein, 493 aa, Artificial Sequence
  Description of Artificial Sequence: Synthetic Chimeric Antigen Receptor
MALPVTALLLPLALLLHAARPQVQLQQPGAELVKPGASVKLSCKASGYTFTRYWMHWVKQRPGQGLEWIGNIDPSDTETHYNQQFKDKATLTVDKSSSTAYMQLSSLTSEDSAVYYCAIYYGNPSYYAMDYWGQGTSVTVSSGGGGSGGGGSGGGGSDIVMTQSPSSLTVTAGEKVTMSCKSSQNLLNSGNQKKYLNWYQQKPGQPPKLLIYWASTRESGVPDRFTGSGSGTDFTLTISSVQAEDLAVYFCQNDYSYPFTFGAGTKLELKTTTPAPRPPTPAPTIASQPLSLRPEACRPAAGGAVHTRGLDFACDIYIWAPLAGTCGVLLLSLVITLYCKRGRKKLLYIFKQPFMRPVQTTQEEDGCSCRFPEEEEGGCELRVKFSRSADAPAYQQGQNQLYNELNLGRREEYDVLDKRRGRDPEMGGKPRRKNPQEGLYNELQKDKMAEAYSEIGMKGERRRGKGHDGLYQGLSTATKDTYDALHMQALPPR

SEQ ID NO: 206983 - protein, 495 aa, Artificial Sequence
  Description of Artificial Sequence: Synthetic Chimeric Antigen Receptor
MALPVTALLLPLALLLHAARPEVQLQQSGPELVKPGASVKMSCKASGYTFTSYVMHWVKQKPGQGLEWIGYINPYNDGTKYNEKFKGKATLTSDTSSSTAYMELNSLTSEDSAVYFSCCARPIYFDNDYFDYWGQGTTLKVSSGGGGSGGGGSGGGGSTIVLTQSPASLAVSLGQRATISCRASESVDSYGNSFMHWYQQKPGQPPKLLIYLASNLESGVPARFSGSGSRTDFTLTIDPVEADDAATYYCQQNNYDPWTFGGGTKLEIKTTTPAPRPPTPAPTIASQPLSLRPEACRPAAGGAVHTRGLDFACDIISFFLALTSTALLFLLFFLTLRFSVVKRGRKKLLYIFKQPFMRPVQTTQEEDGCSCRFPEEEEGGCELRVKFSRSADAPAYQQGQNQLYNELNLGRREEYDVLDKRRGRDPEMGGKPRRKNPQEGLYNELQKDKMAEAYSEIGMKGERRRGKGHDGLYQGLSTATKDTYDALHMQALPPR

SEQ ID NO: 206984 - protein, 496 aa, Artificial Sequence
  Description of Artificial Sequence: Synthetic Chimeric Antigen Receptor
MALPVTALLLPLALLLHAARPQVQLQQPGAELVKPGASVKLSCKASGYTFTRYWMHWVKQRPGQGLEWIGNIDPSDTETHYNQQFKDKATLTVDKSSSTAYMQLSSLTSEDSAVYYCAIYYGNPSYYAMDYWGQGTSVTVSSGGGGSGGGGSGGGGSDIVMTQSPSSLTVTAGEKVTMSCKSSQNLLNSGNQKKYLNWYQQKPGQPPKLLIYWASTRESGVPDRFTGSGSGTDFTLTISSVQAEDLAVYFCQNDYSYPFTFGAGTKLELKTTTPAPRPPTPAPTIASQPLSLRPEACRPAAGGAVHTRGLDFACDIISFFLALTSTALLFLLFFLTLRFSVVKRGRKKLLYIFKQPFMRPVQTTQEEDGCSCRFPEEEEGGCELRVKFSRSADAPAYQQGQNQLYNELNLGRREEYDVLDKRRGRDPEMGGKPRRKNPQEGLYNELQKDKMAEAYSEIGMKGERRRGKGHDGLYQGLSTATKDTYDALHMQALPPR

SEQ ID NO: 206985 - protein, 499 aa, Artificial Sequence
  Description of Artificial Sequence: Synthetic Chimeric Antigen Receptor
MALPVTALLLPLALLLHAARPEVQLVESGGGLVKPGGSLRLSCAASGFTFSSYSMNWVRQAPGKGLEWVSSISSSSSYIYYADSVKGRFTISRDNAKNSLYLQMNSLRAEDTAVYYCARDPSSSGSYYMEDSYYYGMDVWGQGTTVTVSSGGGGSGGGGSGGGGSNFMLTQPHSVSESPGKTVTISCTGSSGSIASNYVQWYQQRPGSAPTTVIYEDNQRPSGVPDRFSGSIDSSSNSASLTISGLKTEDEADYYCQSYDSSNQVVFGGGTKLTVLTTTPAPRPPTPAPTIASQPLSLRPEACRPAAGGAVHTRGLDFACDIYIWAPLAGTCGVLLLSLVITLYCKRGRKKLLYIFKQPFMRPVQTTQEEDGCSCRFPEEEEGGCELRVKFSRSADAPAYKQGQNQLYNELNLGRREEYDVLDKRRGRDPEMGGKPRRKNPQEGLYNELQKDKMAEAYSEIGMKGERRRGKGHDGLYQGLSTATKDTYDALHMQALPPR

SEQ ID NO: 206986 - protein, 499 aa, Artificial Sequence
  Description of Artificial Sequence: Synthetic Chimeric Antigen Receptor
MALPVTALLLPLALLLHAARPQVQLVESGGGLVQPGGSLRLSCAASGFNVSSNYMTWVRQAPGKGLEWVSVIYSGGATYYGDSVKGRFTVSRDNSKNTVYLQMNRLTAEDTAVYYCARDRLYCGNNCYLYYYYGMDVWGQGTLVTVSSGGGGSGGGGSGGGGSGGGGSDIQVTQSPSSLSASVGDRVTITCRASQSISSYLNWYQQKPGKAPKLLIYAASSLQSGVPSRFSGSGSGTDFTLTISSLQPEDFATYYCQQSYSTPPLTFGQGTKVEIKTTTPAPRPPTPAPTIASQPLSLRPEACRPAAGGAVHTRGLDFACDIYIWAPLAGTCGVLLLSLVITLYCKRGRKKLLYIFKQPFMRPVQTTQEEDGCSCRFPEEEEGGCELRVKFSRSADAPAYKQGQNQLYNELNLGRREEYDVLDKRRGRDPEMGGKPRRKNPQEGLYNELQKDKMAEAYSEIGMKGERRRGKGHDGLYQGLSTATKDTYDALHMQALPPR

SEQ ID NO: 206987 - protein, 670 aa, Artificial Sequence
  Description of Artificial Sequence: Synthetic Chimeric Antigen Receptor
MALPVTALLLPLALLLHAARPQVQLQESGPGLVKPSETLSLTCVVSGGSISSSNWWSWVRQPPGKGLEWIGEIYHSGSPNYNPSLKSRVTISVDKSKNQFSLKLSSVTAADTAVYYCARQTTAGSFDYWGQGTLVTVSSGGGGSGGGGSGGGGSDIQMTQSPSSLSASVGDRVTITCRASQSISSYLNWYQQKPGKAPKLLIYAASSLQSGVPSRFSGSGSGTDFTLTISSLQPEDFATYYCQQSYSTPPTFGQGTKVEIKEPKSPDKTHTCPPCPAPPVAGPSVFLFPPKPKDTLMIARTPEVTCVVVDVSHEDPEVKFNWYVDGVEVHNAKTKPREEQYNSTYRVVSVLTVLHQDWLNGKEYKCKVSNKALPAPIEKTISKAKGQPREPQVYTLPPSRDELTKNQVSLTCLVKGFYPSDIAVEWESNGQPENNYKTTPPVLDSDGSFFLYSKLTVDKSRWQQGNVFSCSVMHEALHNHYTQKSLSLSPGKIYIWAPLAGTCGVLLLSLVITLYCKRGRKKLLYIFKQPFMRPVQTTQEEDGCSCRFPEEEEGGCELRVKFSRSADAPAYQQGQNQLYNELNLGRREEYDVLDKRRGRDPEMGGKPRRKNPQEGLYNELQKDKMAEAYSEIGMKGERRRGKGHDGLYQGLSTATKDTYDALHMQALPPR

SEQ ID NO: 206988 - protein, 670 aa, Artificial Sequence
  Description of Artificial Sequence: Synthetic Chimeric Antigen Receptor
MALPVTALLLPLALLLHAARPQVQLQESGPGLVKPSETLSLTCVVSGGSISSSNWWSWVRQPPGKGLEWIGEIYHSGSPNYNPSLKSRVTISVDKSKNQFSLKLSSVTAADTAVYYCARSSSGGFFDYWGQGTLVTVSSGGGGSGGGGSGGGGSDIQMTQSPSSLSASVGDRVTITCRASQSISSYLNWYQQKPGKAPKLLIYAASSLQSGVPSRFSGSGSGTDFTLTISSLQPEDFATYYCQQSYSTPPTFGQGTKVEIKEPKSPDKTHTCPPCPAPPVAGPSVFLFPPKPKDTLMIARTPEVTCVVVDVSHEDPEVKFNWYVDGVEVHNAKTKPREEQYNSTYRVVSVLTVLHQDWLNGKEYKCKVSNKALPAPIEKTISKAKGQPREPQVYTLPPSRDELTKNQVSLTCLVKGFYPSDIAVEWESNGQPENNYKTTPPVLDSDGSFFLYSKLTVDKSRWQQGNVFSCSVMHEALHNHYTQKSLSLSPGKIYIWAPLAGTCGVLLLSLVITLYCKRGRKKLLYIFKQPFMRPVQTTQEEDGCSCRFPEEEEGGCELRVKFSRSADAPAYQQGQNQLYNELNLGRREEYDVLDKRRGRDPEMGGKPRRKNPQEGLYNELQKDKMAEAYSEIGMKGERRRGKGHDGLYQGLSTATKDTYDALHMQALPPR

SEQ ID NO: 206989 - protein, 671 aa, Artificial Sequence
  Description of Artificial Sequence: Synthetic Chimeric Antigen Receptor
MALPVTALLLPLALLLHAARPQVQLQQPGAELVKPGTSVKLSCKASGYTFTRYWMHWVKQRPGQGLEWIGMIHPSSGSTSYNEKVKNKATLTVDRSSTTAYMQLSSLTSEDSAVYYCARDGDYYYGTGDYWGQGTTLTVSSGGGGSGGGGSGGGGSQIVLSQSPAILSASPGEKVTMTCRASSSINYMHWYQQKPGSSPKPWIFATSNLASGVPSRFSGSGSGTSYSLTISRVEAEDAATYYCQQWRSDRALTFGAGTKLELEPKSPDKTHTCPPCPAPPVAGPSVFLFPPKPKDTLMIARTPEVTCVVVDVSHEDPEVKFNWYVDGVEVHNAKTKPREEQYNSTYRVVSVLTVLHQDWLNGKEYKCKVSNKALPAPIEKTISKAKGQPREPQVYTLPPSRDELTKNQVSLTCLVKGFYPSDIAVEWESNGQPENNYKTTPPVLDSDGSFFLYSKLTVDKSRWQQGNVFSCSVMHEALHNHYTQKSLSLSPGKIYIWAPLAGTCGVLLLSLVITLYCKRGRKKLLYIFKQPFMRPVQTTQEEDGCSCRFPEEEEGGCELRVKFSRSADAPAYQQGQNQLYNELNLGRREEYDVLDKRRGRDPEMGGKPRRKNPQEGLYNELQKDKMAEAYSEIGMKGERRRGKGHDGLYQGLSTATKDTYDALHMQALPPR

SEQ ID NO: 206990 - protein, 672 aa, Artificial Sequence
  Description of Artificial Sequence: Synthetic Chimeric Antigen Receptor
MALPVTALLLPLALLLHAARPEVQLQQSGAELVRPGASVKLSCTASGFNIKDDYIHWVKQRPEQGLEWIGWIDPEKGDTAYASKFQDKATITSDTSSNTAYLQLSSLTSEDTAVYYCTLTGRFDYWGQGTTLTVSSGGGGSGGGGSGGGGSDIVMSQSPSSLAVSVGEKVTMSCKSSQSLLYSSNQKNNLAWYQQKPGQSPKLLIYWASTRESGVPDRFTGSGSGTDFTLTISSVQAEDLAVYYCQQYYSYRTFGGGTKLEIKEPKSPDKTHTCPPCPAPPVAGPSVFLFPPKPKDTLMIARTPEVTCVVVDVSHEDPEVKFNWYVDGVEVHNAKTKPREEQYNSTYRVVSVLTVLHQDWLNGKEYKCKVSNKALPAPIEKTISKAKGQPREPQVYTLPPSRDELTKNQVSLTCLVKGFYPSDIAVEWESNGQPENNYKTTPPVLDSDGSFFLYSKLTVDKSRWQQGNVFSCSVMHEALHNHYTQKSLSLSPGKIYIWAPLAGTCGVLLLSLVITLYCKRGRKKLLYIFKQPFMRPVQTTQEEDGCSCRFPEEEEGGCELRVKFSRSADAPAYQQGQNQLYNELNLGRREEYDVLDKRRGRDPEMGGKPRRKNPQEGLYNELQKDKMAEAYSEIGMKGERRRGKGHDGLYQGLSTATKDTYDALHMQALPPR

SEQ ID NO: 206991 - protein, 672 aa, Artificial Sequence
  Description of Artificial Sequence: Synthetic Chimeric Antigen Receptor
MALPVTALLLPLALLLHAARPEVQLQQSGPELVKPGASVKMSCKASGYIFTSYVMYWVKQKPGQGLEWIGYINPYNDGTKYNEKFKGKATLTSDKSSSTAYMELSSLTSEDSAVYYSCCARYYDYDYYFDYWGQGTTLTVSSGGGGSGGGGSGGGGSDIQMTQSPSSLSASLGGKVTITCKASQDINKYIAWYQHKPGKGPRLLIHYTSTLQPGIPSRFSGSGSGRDYSFSISNLEPEDIATYYCLQYDYLWTFGGGTKLEIKEPKSPDKTHTCPPCPAPPVAGPSVFLFPPKPKDTLMIARTPEVTCVVVDVSHEDPEVKFNWYVDGVEVHNAKTKPREEQYNSTYRVVSVLTVLHQDWLNGKEYKCKVSNKALPAPIEKTISKAKGQPREPQVYTLPPSRDELTKNQVSLTCLVKGFYPSDIAVEWESNGQPENNYKTTPPVLDSDGSFFLYSKLTVDKSRWQQGNVFSCSVMHEALHNHYTQKSLSLSPGKIYIWAPLAGTCGVLLLSLVITLYCKRGRKKLLYIFKQPFMRPVQTTQEEDGCSCRFPEEEEGGCELRVKFSRSADAPAYQQGQNQLYNELNLGRREEYDVLDKRRGRDPEMGGKPRRKNPQEGLYNELQKDKMAEAYSEIGMKGERRRGKGHDGLYQGLSTATKDTYDALHMQALPPR

SEQ ID NO: 206992 - protein, 673 aa, Artificial Sequence
  Description of Artificial Sequence: Synthetic Chimeric Antigen Receptor
MALPVTALLLPLALLLHAARPEVQLQQSGPELVKPGASVKMSCKASGYTFTSYFIHWVKQKPGQGLEWIGFINPYNDGSKYNEKFKGKATLTSDKSSSTAYMELSSLTSEDSAVYYCTRDDGYYGYAMDYWGQGTSVTVSSGGGGSGGGGSGGGGSDIQMTQSPSSLSASLGERVSLTCRATQELSGYLSWLQQKPDGTIKRLIYAASTLDSGVPKRFSGNRSGSDYSLTISSLESEDFADYYCLQYAIYPYTFGGGTKLEIKREPKSPDKTHTCPPCPAPPVAGPSVFLFPPKPKDTLMIARTPEVTCVVVDVSHEDPEVKFNWYVDGVEVHNAKTKPREEQYNSTYRVVSVLTVLHQDWLNGKEYKCKVSNKALPAPIEKTISKAKGQPREPQVYTLPPSRDELTKNQVSLTCLVKGFYPSDIAVEWESNGQPENNYKTTPPVLDSDGSFFLYSKLTVDKSRWQQGNVFSCSVMHEALHNHYTQKSLSLSPGKIYIWAPLAGTCGVLLLSLVITLYCKRGRKKLLYIFKQPFMRPVQTTQEEDGCSCRFPEEEEGGCELRVKFSRSADAPAYQQGQNQLYNELNLGRREEYDVLDKRRGRDPEMGGKPRRKNPQEGLYNELQKDKMAEAYSEIGMKGERRRGKGHDGLYQGLSTATKDTYDALHMQALPPR

SEQ ID NO: 206993 - protein, 673 aa, Artificial Sequence
  Description of Artificial Sequence: Synthetic Chimeric Antigen Receptor
MALPVTALLLPLALLLHAARPEVQLRQSGPELVKPGASVKMSCKASGYTFTSYFMHWVKQKPGQGLEWIGFINPYNDGTKYNEKFKGKATLTSDKSSSTAYMELNSLTSEDSAVYYCTRDDGYYDYAMDYWGQGTSVTVSSGGGGSGGGGSGGGGSDIQMTQSPSSLSASLGERVSLTCRASQEISVYLSWLQQKPDGTIKRLIYAASTLDSGVPERFSGSRSGSDYSLTISSLESEDFADYYCLQYASYPYTFGGGTKLEIKREPKSPDKTHTCPPCPAPPVAGPSVFLFPPKPKDTLMIARTPEVTCVVVDVSHEDPEVKFNWYVDGVEVHNAKTKPREEQYNSTYRVVSVLTVLHQDWLNGKEYKCKVSNKALPAPIEKTISKAKGQPREPQVYTLPPSRDELTKNQVSLTCLVKGFYPSDIAVEWESNGQPENNYKTTPPVLDSDGSFFLYSKLTVDKSRWQQGNVFSCSVMHEALHNHYTQKSLSLSPGKIYIWAPLAGTCGVLLLSLVITLYCKRGRKKLLYIFKQPFMRPVQTTQEEDGCSCRFPEEEEGGCELRVKFSRSADAPAYQQGQNQLYNELNLGRREEYDVLDKRRGRDPEMGGKPRRKNPQEGLYNELQKDKMAEAYSEIGMKGERRRGKGHDGLYQGLSTATKDTYDALHMQALPPR

SEQ ID NO: 206994 - protein, 673 aa, Artificial Sequence
  Description of Artificial Sequence: Synthetic Chimeric Antigen Receptor
MALPVTALLLPLALLLHAARPQVQLQESGPGLVKPSETLSLTCVVSGGSISSSNWWSWVRQPPGKGLEWIGEIYHSGSPNYNPSLKSRVTISVDKSKNQFSLKLSSVTAADTAVYYCARQTTAGSFDYWGQGTLVTVSSGGGGSGGGGSGGGGSDIQMTQSPSSLSASVGDRVTITCRASQSISSYLNWYQQKPGKAPKLLIYAASSLQSGVPSRFSGSGSGTDFTLTISSLQPEDFATYYCQQSYSTPPTFGQGTKVEIKEPKSPDKTHTCPPCPAPPVAGPSVFLFPPKPKDTLMIARTPEVTCVVVDVSHEDPEVKFNWYVDGVEVHNAKTKPREEQYNSTYRVVSVLTVLHQDWLNGKEYKCKVSNKALPAPIEKTISKAKGQPREPQVYTLPPSRDELTKNQVSLTCLVKGFYPSDIAVEWESNGQPENNYKTTPPVLDSDGSFFLYSKLTVDKSRWQQGNVFSCSVMHEALHNHYTQKSLSLSPGKIISFFLALTSTALLFLLFFLTLRFSVVKRGRKKLLYIFKQPFMRPVQTTQEEDGCSCRFPEEEEGGCELRVKFSRSADAPAYQQGQNQLYNELNLGRREEYDVLDKRRGRDPEMGGKPRRKNPQEGLYNELQKDKMAEAYSEIGMKGERRRGKGHDGLYQGLSTATKDTYDALHMQALPPR

SEQ ID NO: 206995 - protein, 673 aa, Artificial Sequence
  Description of Artificial Sequence: Synthetic Chimeric Antigen Receptor
MALPVTALLLPLALLLHAARPQVQLQESGPGLVKPSETLSLTCVVSGGSISSSNWWSWVRQPPGKGLEWIGEIYHSGSPNYNPSLKSRVTISVDKSKNQFSLKLSSVTAADTAVYYCARSSSGGFFDYWGQGTLVTVSSGGGGSGGGGSGGGGSDIQMTQSPSSLSASVGDRVTITCRASQSISSYLNWYQQKPGKAPKLLIYAASSLQSGVPSRFSGSGSGTDFTLTISSLQPEDFATYYCQQSYSTPPTFGQGTKVEIKEPKSPDKTHTCPPCPAPPVAGPSVFLFPPKPKDTLMIARTPEVTCVVVDVSHEDPEVKFNWYVDGVEVHNAKTKPREEQYNSTYRVVSVLTVLHQDWLNGKEYKCKVSNKALPAPIEKTISKAKGQPREPQVYTLPPSRDELTKNQVSLTCLVKGFYPSDIAVEWESNGQPENNYKTTPPVLDSDGSFFLYSKLTVDKSRWQQGNVFSCSVMHEALHNHYTQKSLSLSPGKIISFFLALTSTALLFLLFFLTLRFSVVKRGRKKLLYIFKQPFMRPVQTTQEEDGCSCRFPEEEEGGCELRVKFSRSADAPAYQQGQNQLYNELNLGRREEYDVLDKRRGRDPEMGGKPRRKNPQEGLYNELQKDKMAEAYSEIGMKGERRRGKGHDGLYQGLSTATKDTYDALHMQALPPR

SEQ ID NO: 206996 - protein, 674 aa, Artificial Sequence
  Description of Artificial Sequence: Synthetic Chimeric Antigen Receptor
MALPVTALLLPLALLLHAARPEVQLQQSGPELVKPGASMKISCKASGYSFTGYTMNWVKQSHEKNLEWIGPINPYNDGTIYNPNFKGKATLTVDKASSTAYMELLSLTSDDPAVYYSCCARTDDYDDYTMDYWGQGTSVTVSSGGGGSGGGGSGGGGSEIQMTQTPSSLSASLGDRVTISCRASHDISNYLNWYQQKPDGTLKLLIYYTSRLHSGVPSRFSGSGSGTDYSLTISNLEQEDIATYFCQQGKTLLWTFGGGTKLEIKEPKSPDKTHTCPPCPAPPVAGPSVFLFPPKPKDTLMIARTPEVTCVVVDVSHEDPEVKFNWYVDGVEVHNAKTKPREEQYNSTYRVVSVLTVLHQDWLNGKEYKCKVSNKALPAPIEKTISKAKGQPREPQVYTLPPSRDELTKNQVSLTCLVKGFYPSDIAVEWESNGQPENNYKTTPPVLDSDGSFFLYSKLTVDKSRWQQGNVFSCSVMHEALHNHYTQKSLSLSPGKIYIWAPLAGTCGVLLLSLVITLYCKRGRKKLLYIFKQPFMRPVQTTQEEDGCSCRFPEEEEGGCELRVKFSRSADAPAYQQGQNQLYNELNLGRREEYDVLDKRRGRDPEMGGKPRRKNPQEGLYNELQKDKMAEAYSEIGMKGERRRGKGHDGLYQGLSTATKDTYDALHMQALPPR

SEQ ID NO: 206997 - protein, 674 aa, Artificial Sequence
  Description of Artificial Sequence: Synthetic Chimeric Antigen Receptor
MALPVTALLLPLALLLHAARPQVQLQQPGAELVKPGTSVKLSCKASGYTFTRYWMHWVKQRPGQGLEWIGMIHPSSGSTSYNEKVKNKATLTVDRSSTTAYMQLSSLTSEDSAVYYCARDGDYYYGTGDYWGQGTTLTVSSGGGGSGGGGSGGGGSQIVLSQSPAILSASPGEKVTMTCRASSSINYMHWYQQKPGSSPKPWIFATSNLASGVPSRFSGSGSGTSYSLTISRVEAEDAATYYCQQWRSDRALTFGAGTKLELEPKSPDKTHTCPPCPAPPVAGPSVFLFPPKPKDTLMIARTPEVTCVVVDVSHEDPEVKFNWYVDGVEVHNAKTKPREEQYNSTYRVVSVLTVLHQDWLNGKEYKCKVSNKALPAPIEKTISKAKGQPREPQVYTLPPSRDELTKNQVSLTCLVKGFYPSDIAVEWESNGQPENNYKTTPPVLDSDGSFFLYSKLTVDKSRWQQGNVFSCSVMHEALHNHYTQKSLSLSPGKIISFFLALTSTALLFLLFFLTLRFSVVKRGRKKLLYIFKQPFMRPVQTTQEEDGCSCRFPEEEEGGCELRVKFSRSADAPAYQQGQNQLYNELNLGRREEYDVLDKRRGRDPEMGGKPRRKNPQEGLYNELQKDKMAEAYSEIGMKGERRRGKGHDGLYQGLSTATKDTYDALHMQALPPR

SEQ ID NO: 206998 - protein, 675 aa, Artificial Sequence
  Description of Artificial Sequence: Synthetic Chimeric Antigen Receptor
MALPVTALLLPLALLLHAARPDIQLQESGPGLVKPSQSLSLTCSVTGYSITSAYYWNWIRQFPGNKLEWMGYISYDGRNNYNPSLKNRISITRDTSKNQFFLKLNSVTTEDTATYYCAKEGDYDVGNYYAMDYWGQGTSVTVSSGGGGSGGGGSGGGGSENVLTQSPAIMSASPGEKVTMTCRASSNVISSYVHWYQQRSGASPKLWIYSTSNLASGVPARFSGSGSGTSYSLTISSVEAEDAATYYCQQYSGYPLTFGAGTKLELEPKSPDKTHTCPPCPAPPVAGPSVFLFPPKPKDTLMIARTPEVTCVVVDVSHEDPEVKFNWYVDGVEVHNAKTKPREEQYNSTYRVVSVLTVLHQDWLNGKEYKCKVSNKALPAPIEKTISKAKGQPREPQVYTLPPSRDELTKNQVSLTCLVKGFYPSDIAVEWESNGQPENNYKTTPPVLDSDGSFFLYSKLTVDKSRWQQGNVFSCSVMHEALHNHYTQKSLSLSPGKIYIWAPLAGTCGVLLLSLVITLYCKRGRKKLLYIFKQPFMRPVQTTQEEDGCSCRFPEEEEGGCELRVKFSRSADAPAYQQGQNQLYNELNLGRREEYDVLDKRRGRDPEMGGKPRRKNPQEGLYNELQKDKMAEAYSEIGMKGERRRGKGHDGLYQGLSTATKDTYDALHMQALPPR

SEQ ID NO: 206999 - protein, 675 aa, Artificial Sequence
  Description of Artificial Sequence: Synthetic Chimeric Antigen Receptor
MALPVTALLLPLALLLHAARPEVQLQQSGAELVRPGASVKLSCTASGFNIKDDYIHWVKQRPEQGLEWIGWIDPEKGDTAYASKFQDKATITSDTSSNTAYLQLSSLTSEDTAVYYCTLTGRFDYWGQGTTLTVSSGGGGSGGGGSGGGGSDIVMSQSPSSLAVSVGEKVTMSCKSSQSLLYSSNQKNNLAWYQQKPGQSPKLLIYWASTRESGVPDRFTGSGSGTDFTLTISSVQAEDLAVYYCQQYYSYRTFGGGTKLEIKEPKSPDKTHTCPPCPAPPVAGPSVFLFPPKPKDTLMIARTPEVTCVVVDVSHEDPEVKFNWYVDGVEVHNAKTKPREEQYNSTYRVVSVLTVLHQDWLNGKEYKCKVSNKALPAPIEKTISKAKGQPREPQVYTLPPSRDELTKNQVSLTCLVKGFYPSDIAVEWESNGQPENNYKTTPPVLDSDGSFFLYSKLTVDKSRWQQGNVFSCSVMHEALHNHYTQKSLSLSPGKIISFFLALTSTALLFLLFFLTLRFSVVKRGRKKLLYIFKQPFMRPVQTTQEEDGCSCRFPEEEEGGCELRVKFSRSADAPAYQQGQNQLYNELNLGRREEYDVLDKRRGRDPEMGGKPRRKNPQEGLYNELQKDKMAEAYSEIGMKGERRRGKGHDGLYQGLSTATKDTYDALHMQALPPR

SEQ ID NO: 207000 - protein, 675 aa, Artificial Sequence
  Description of Artificial Sequence: Synthetic Chimeric Antigen Receptor
MALPVTALLLPLALLLHAARPEVQLQQSGPELVKPGASVKMSCKASGYIFTSYVMYWVKQKPGQGLEWIGYINPYNDGTKYNEKFKGKATLTSDKSSSTAYMELSSLTSEDSAVYYSCCARYYDYDYYFDYWGQGTTLTVSSGGGGSGGGGSGGGGSDIQMTQSPSSLSASLGGKVTITCKASQDINKYIAWYQHKPGKGPRLLIHYTSTLQPGIPSRFSGSGSGRDYSFSISNLEPEDIATYYCLQYDYLWTFGGGTKLEIKEPKSPDKTHTCPPCPAPPVAGPSVFLFPPKPKDTLMIARTPEVTCVVVDVSHEDPEVKFNWYVDGVEVHNAKTKPREEQYNSTYRVVSVLTVLHQDWLNGKEYKCKVSNKALPAPIEKTISKAKGQPREPQVYTLPPSRDELTKNQVSLTCLVKGFYPSDIAVEWESNGQPENNYKTTPPVLDSDGSFFLYSKLTVDKSRWQQGNVFSCSVMHEALHNHYTQKSLSLSPGKIISFFLALTSTALLFLLFFLTLRFSVVKRGRKKLLYIFKQPFMRPVQTTQEEDGCSCRFPEEEEGGCELRVKFSRSADAPAYQQGQNQLYNELNLGRREEYDVLDKRRGRDPEMGGKPRRKNPQEGLYNELQKDKMAEAYSEIGMKGERRRGKGHDGLYQGLSTATKDTYDALHMQALPPR

SEQ ID NO: 207001 - protein, 676 aa, Artificial Sequence
  Description of Artificial Sequence: Synthetic Chimeric Antigen Receptor
MALPVTALLLPLALLLHAARPEVQLQQSGPELVKPGASVKMSCKASGYTFTSYFIHWVKQKPGQGLEWIGFINPYNDGSKYNEKFKGKATLTSDKSSSTAYMELSSLTSEDSAVYYCTRDDGYYGYAMDYWGQGTSVTVSSGGGGSGGGGSGGGGSDIQMTQSPSSLSASLGERVSLTCRATQELSGYLSWLQQKPDGTIKRLIYAASTLDSGVPKRFSGNRSGSDYSLTISSLESEDFADYYCLQYAIYPYTFGGGTKLEIKREPKSPDKTHTCPPCPAPPVAGPSVFLFPPKPKDTLMIARTPEVTCVVVDVSHEDPEVKFNWYVDGVEVHNAKTKPREEQYNSTYRVVSVLTVLHQDWLNGKEYKCKVSNKALPAPIEKTISKAKGQPREPQVYTLPPSRDELTKNQVSLTCLVKGFYPSDIAVEWESNGQPENNYKTTPPVLDSDGSFFLYSKLTVDKSRWQQGNVFSCSVMHEALHNHYTQKSLSLSPGKIISFFLALTSTALLFLLFFLTLRFSVVKRGRKKLLYIFKQPFMRPVQTTQEEDGCSCRFPEEEEGGCELRVKFSRSADAPAYQQGQNQLYNELNLGRREEYDVLDKRRGRDPEMGGKPRRKNPQEGLYNELQKDKMAEAYSEIGMKGERRRGKGHDGLYQGLSTATKDTYDALHMQALPPR

SEQ ID NO: 207002 - protein, 676 aa, Artificial Sequence
  Description of Artificial Sequence: Synthetic Chimeric Antigen Receptor
MALPVTALLLPLALLLHAARPEVQLRQSGPELVKPGASVKMSCKASGYTFTSYFMHWVKQKPGQGLEWIGFINPYNDGTKYNEKFKGKATLTSDKSSSTAYMELNSLTSEDSAVYYCTRDDGYYDYAMDYWGQGTSVTVSSGGGGSGGGGSGGGGSDIQMTQSPSSLSASLGERVSLTCRASQEISVYLSWLQQKPDGTIKRLIYAASTLDSGVPERFSGSRSGSDYSLTISSLESEDFADYYCLQYASYPYTFGGGTKLEIKREPKSPDKTHTCPPCPAPPVAGPSVFLFPPKPKDTLMIARTPEVTCVVVDVSHEDPEVKFNWYVDGVEVHNAKTKPREEQYNSTYRVVSVLTVLHQDWLNGKEYKCKVSNKALPAPIEKTISKAKGQPREPQVYTLPPSRDELTKNQVSLTCLVKGFYPSDIAVEWESNGQPENNYKTTPPVLDSDGSFFLYSKLTVDKSRWQQGNVFSCSVMHEALHNHYTQKSLSLSPGKIISFFLALTSTALLFLLFFLTLRFSVVKRGRKKLLYIFKQPFMRPVQTTQEEDGCSCRFPEEEEGGCELRVKFSRSADAPAYQQGQNQLYNELNLGRREEYDVLDKRRGRDPEMGGKPRRKNPQEGLYNELQKDKMAEAYSEIGMKGERRRGKGHDGLYQGLSTATKDTYDALHMQALPPR

SEQ ID NO: 207003 - protein, 676 aa, Artificial Sequence
  Description of Artificial Sequence: Synthetic Chimeric Antigen Receptor
MALPVTALLLPLALLLHAARPQVQLQQPGAELVKPGASMKMSCKASGYTFPSSNIHWLKQTPGQGLEWIGVIYPGNGDTSYNQKFKDKATLTTDKSSSTAYMQLSSLTSEDSAIYFSCCARVYNWHFDVWGAGTTVTVSSGGGGSGGGGSGGGGSNIVLTQSPASLAVSLGQRATISCRASESVDGYGDIFMLWYQQKPGQPPKLLIYFASNLESGVPARFSGSGSRTDFTLTIDPVEADDAATYYCQQNNEDPYTFGGGTKLEIKREPKSPDKTHTCPPCPAPPVAGPSVFLFPPKPKDTLMIARTPEVTCVVVDVSHEDPEVKFNWYVDGVEVHNAKTKPREEQYNSTYRVVSVLTVLHQDWLNGKEYKCKVSNKALPAPIEKTISKAKGQPREPQVYTLPPSRDELTKNQVSLTCLVKGFYPSDIAVEWESNGQPENNYKTTPPVLDSDGSFFLYSKLTVDKSRWQQGNVFSCSVMHEALHNHYTQKSLSLSPGKIYIWAPLAGTCGVLLLSLVITLYCKRGRKKLLYIFKQPFMRPVQTTQEEDGCSCRFPEEEEGGCELRVKFSRSADAPAYQQGQNQLYNELNLGRREEYDVLDKRRGRDPEMGGKPRRKNPQEGLYNELQKDKMAEAYSEIGMKGERRRGKGHDGLYQGLSTATKDTYDALHMQALPPR

SEQ ID NO: 207004 - protein, 677 aa, Artificial Sequence
  Description of Artificial Sequence: Synthetic Chimeric Antigen Receptor
MALPVTALLLPLALLLHAARPEVQLQQSGPELVKPGASMKISCKASGYSFTGYTMNWVKQSHEKNLEWIGPINPYNDGTIYNPNFKGKATLTVDKASSTAYMELLSLTSDDPAVYYSCCARTDDYDDYTMDYWGQGTSVTVSSGGGGSGGGGSGGGGSEIQMTQTPSSLSASLGDRVTISCRASHDISNYLNWYQQKPDGTLKLLIYYTSRLHSGVPSRFSGSGSGTDYSLTISNLEQEDIATYFCQQGKTLLWTFGGGTKLEIKEPKSPDKTHTCPPCPAPPVAGPSVFLFPPKPKDTLMIARTPEVTCVVVDVSHEDPEVKFNWYVDGVEVHNAKTKPREEQYNSTYRVVSVLTVLHQDWLNGKEYKCKVSNKALPAPIEKTISKAKGQPREPQVYTLPPSRDELTKNQVSLTCLVKGFYPSDIAVEWESNGQPENNYKTTPPVLDSDGSFFLYSKLTVDKSRWQQGNVFSCSVMHEALHNHYTQKSLSLSPGKIISFFLALTSTALLFLLFFLTLRFSVVKRGRKKLLYIFKQPFMRPVQTTQEEDGCSCRFPEEEEGGCELRVKFSRSADAPAYQQGQNQLYNELNLGRREEYDVLDKRRGRDPEMGGKPRRKNPQEGLYNELQKDKMAEAYSEIGMKGERRRGKGHDGLYQGLSTATKDTYDALHMQALPPR

SEQ ID NO: 207005 - protein, 678 aa, Artificial Sequence
  Description of Artificial Sequence: Synthetic Chimeric Antigen Receptor
MALPVTALLLPLALLLHAARPDIQLQESGPGLVKPSQSLSLTCSVTGYSITSAYYWNWIRQFPGNKLEWMGYISYDGRNNYNPSLKNRISITRDTSKNQFFLKLNSVTTEDTATYYCAKEGDYDVGNYYAMDYWGQGTSVTVSSGGGGSGGGGSGGGGSENVLTQSPAIMSASPGEKVTMTCRASSNVISSYVHWYQQRSGASPKLWIYSTSNLASGVPARFSGSGSGTSYSLTISSVEAEDAATYYCQQYSGYPLTFGAGTKLELEPKSPDKTHTCPPCPAPPVAGPSVFLFPPKPKDTLMIARTPEVTCVVVDVSHEDPEVKFNWYVDGVEVHNAKTKPREEQYNSTYRVVSVLTVLHQDWLNGKEYKCKVSNKALPAPIEKTISKAKGQPREPQVYTLPPSRDELTKNQVSLTCLVKGFYPSDIAVEWESNGQPENNYKTTPPVLDSDGSFFLYSKLTVDKSRWQQGNVFSCSVMHEALHNHYTQKSLSLSPGKIISFFLALTSTALLFLLFFLTLRFSVVKRGRKKLLYIFKQPFMRPVQTTQEEDGCSCRFPEEEEGGCELRVKFSRSADAPAYQQGQNQLYNELNLGRREEYDVLDKRRGRDPEMGGKPRRKNPQEGLYNELQKDKMAEAYSEIGMKGERRRGKGHDGLYQGLSTATKDTYDALHMQALPPR

SEQ ID NO: 207006 - protein, 678 aa, Artificial Sequence
  Description of Artificial Sequence: Synthetic Chimeric Antigen Receptor
MALPVTALLLPLALLLHAARPEVQLQQSGPELVKPGASVKMSCKASGYTFTSYVMHWVKQKPGQGLEWIGYINPYNDGTKYNEKFKGKATLTSDTSSSTAYMELNSLTSEDSAVYFSCCARPIYFDNDYFDYWGQGTTLKVSSGGGGSGGGGSGGGGSTIVLTQSPASLAVSLGQRATISCRASESVDSYGNSFMHWYQQKPGQPPKLLIYLASNLESGVPARFSGSGSRTDFTLTIDPVEADDAATYYCQQNNYDPWTFGGGTKLEIKEPKSPDKTHTCPPCPAPPVAGPSVFLFPPKPKDTLMIARTPEVTCVVVDVSHEDPEVKFNWYVDGVEVHNAKTKPREEQYNSTYRVVSVLTVLHQDWLNGKEYKCKVSNKALPAPIEKTISKAKGQPREPQVYTLPPSRDELTKNQVSLTCLVKGFYPSDIAVEWESNGQPENNYKTTPPVLDSDGSFFLYSKLTVDKSRWQQGNVFSCSVMHEALHNHYTQKSLSLSPGKIYIWAPLAGTCGVLLLSLVITLYCKRGRKKLLYIFKQPFMRPVQTTQEEDGCSCRFPEEEEGGCELRVKFSRSADAPAYQQGQNQLYNELNLGRREEYDVLDKRRGRDPEMGGKPRRKNPQEGLYNELQKDKMAEAYSEIGMKGERRRGKGHDGLYQGLSTATKDTYDALHMQALPPR

SEQ ID NO: 207007 - protein, 679 aa, Artificial Sequence
  Description of Artificial Sequence: Synthetic Chimeric Antigen Receptor
MALPVTALLLPLALLLHAARPQVQLQQPGAELVKPGASMKMSCKASGYTFPSSNIHWLKQTPGQGLEWIGVIYPGNGDTSYNQKFKDKATLTTDKSSSTAYMQLSSLTSEDSAIYFSCCARVYNWHFDVWGAGTTVTVSSGGGGSGGGGSGGGGSNIVLTQSPASLAVSLGQRATISCRASESVDGYGDIFMLWYQQKPGQPPKLLIYFASNLESGVPARFSGSGSRTDFTLTIDPVEADDAATYYCQQNNEDPYTFGGGTKLEIKREPKSPDKTHTCPPCPAPPVAGPSVFLFPPKPKDTLMIARTPEVTCVVVDVSHEDPEVKFNWYVDGVEVHNAKTKPREEQYNSTYRVVSVLTVLHQDWLNGKEYKCKVSNKALPAPIEKTISKAKGQPREPQVYTLPPSRDELTKNQVSLTCLVKGFYPSDIAVEWESNGQPENNYKTTPPVLDSDGSFFLYSKLTVDKSRWQQGNVFSCSVMHEALHNHYTQKSLSLSPGKIISFFLALTSTALLFLLFFLTLRFSVVKRGRKKLLYIFKQPFMRPVQTTQEEDGCSCRFPEEEEGGCELRVKFSRSADAPAYQQGQNQLYNELNLGRREEYDVLDKRRGRDPEMGGKPRRKNPQEGLYNELQKDKMAEAYSEIGMKGERRRGKGHDGLYQGLSTATKDTYDALHMQALPPR

SEQ ID NO: 207008 - protein, 679 aa, Artificial Sequence
  Description of Artificial Sequence: Synthetic Chimeric Antigen Receptor
MALPVTALLLPLALLLHAARPQVQLQQPGAELVKPGASVKLSCKASGYTFTRYWMHWVKQRPGQGLEWIGNIDPSDTETHYNQQFKDKATLTVDKSSSTAYMQLSSLTSEDSAVYYCAIYYGNPSYYAMDYWGQGTSVTVSSGGGGSGGGGSGGGGSDIVMTQSPSSLTVTAGEKVTMSCKSSQNLLNSGNQKKYLNWYQQKPGQPPKLLIYWASTRESGVPDRFTGSGSGTDFTLTISSVQAEDLAVYFCQNDYSYPFTFGAGTKLELKEPKSPDKTHTCPPCPAPPVAGPSVFLFPPKPKDTLMIARTPEVTCVVVDVSHEDPEVKFNWYVDGVEVHNAKTKPREEQYNSTYRVVSVLTVLHQDWLNGKEYKCKVSNKALPAPIEKTISKAKGQPREPQVYTLPPSRDELTKNQVSLTCLVKGFYPSDIAVEWESNGQPENNYKTTPPVLDSDGSFFLYSKLTVDKSRWQQGNVFSCSVMHEALHNHYTQKSLSLSPGKIYIWAPLAGTCGVLLLSLVITLYCKRGRKKLLYIFKQPFMRPVQTTQEEDGCSCRFPEEEEGGCELRVKFSRSADAPAYQQGQNQLYNELNLGRREEYDVLDKRRGRDPEMGGKPRRKNPQEGLYNELQKDKMAEAYSEIGMKGERRRGKGHDGLYQGLSTATKDTYDALHMQALPPR

SEQ ID NO: 207009 - protein, 681 aa, Artificial Sequence
  Description of Artificial Sequence: Synthetic Chimeric Antigen Receptor
MALPVTALLLPLALLLHAARPEVQLQQSGPELVKPGASVKMSCKASGYTFTSYVMHWVKQKPGQGLEWIGYINPYNDGTKYNEKFKGKATLTSDTSSSTAYMELNSLTSEDSAVYFSCCARPIYFDNDYFDYWGQGTTLKVSSGGGGSGGGGSGGGGSTIVLTQSPASLAVSLGQRATISCRASESVDSYGNSFMHWYQQKPGQPPKLLIYLASNLESGVPARFSGSGSRTDFTLTIDPVEADDAATYYCQQNNYDPWTFGGGTKLEIKEPKSPDKTHTCPPCPAPPVAGPSVFLFPPKPKDTLMIARTPEVTCVVVDVSHEDPEVKFNWYVDGVEVHNAKTKPREEQYNSTYRVVSVLTVLHQDWLNGKEYKCKVSNKALPAPIEKTISKAKGQPREPQVYTLPPSRDELTKNQVSLTCLVKGFYPSDIAVEWESNGQPENNYKTTPPVLDSDGSFFLYSKLTVDKSRWQQGNVFSCSVMHEALHNHYTQKSLSLSPGKIISFFLALTSTALLFLLFFLTLRFSVVKRGRKKLLYIFKQPFMRPVQTTQEEDGCSCRFPEEEEGGCELRVKFSRSADAPAYQQGQNQLYNELNLGRREEYDVLDKRRGRDPEMGGKPRRKNPQEGLYNELQKDKMAEAYSEIGMKGERRRGKGHDGLYQGLSTATKDTYDALHMQALPPR

SEQ ID NO: 207010 - protein, 682 aa, Artificial Sequence
  Description of Artificial Sequence: Synthetic Chimeric Antigen Receptor
MALPVTALLLPLALLLHAARPQVQLQQPGAELVKPGASVKLSCKASGYTFTRYWMHWVKQRPGQGLEWIGNIDPSDTETHYNQQFKDKATLTVDKSSSTAYMQLSSLTSEDSAVYYCAIYYGNPSYYAMDYWGQGTSVTVSSGGGGSGGGGSGGGGSDIVMTQSPSSLTVTAGEKVTMSCKSSQNLLNSGNQKKYLNWYQQKPGQPPKLLIYWASTRESGVPDRFTGSGSGTDFTLTISSVQAEDLAVYFCQNDYSYPFTFGAGTKLELKEPKSPDKTHTCPPCPAPPVAGPSVFLFPPKPKDTLMIARTPEVTCVVVDVSHEDPEVKFNWYVDGVEVHNAKTKPREEQYNSTYRVVSVLTVLHQDWLNGKEYKCKVSNKALPAPIEKTISKAKGQPREPQVYTLPPSRDELTKNQVSLTCLVKGFYPSDIAVEWESNGQPENNYKTTPPVLDSDGSFFLYSKLTVDKSRWQQGNVFSCSVMHEALHNHYTQKSLSLSPGKIISFFLALTSTALLFLLFFLTLRFSVVKRGRKKLLYIFKQPFMRPVQTTQEEDGCSCRFPEEEEGGCELRVKFSRSADAPAYQQGQNQLYNELNLGRREEYDVLDKRRGRDPEMGGKPRRKNPQEGLYNELQKDKMAEAYSEIGMKGERRRGKGHDGLYQGLSTATKDTYDALHMQALPPR

SEQ ID NO: 207011 - protein, 535 aa, Artificial Sequence
  Description of Artificial Sequence: Synthetic Chimeric Antigen Receptor
MALPVTALLLPLALLLHAARPGSEIQLQQSGAELVKPGASVKLSCTGSGFNIEDYYIHWVKQRTEQGLEWIGRIDPENDETKYGPIFQGRATITADTSSNTVYLQLSSLTSEDTAVYYCAFRGGVYWGPGTTLTVSSGGGGSGGGGSGGGGSHMDVVMTQSPLTLSVAIGQSASISCKSSQSLLDSDGKTYLNWLLQRPGQSPKRLISLVSKLDSGVPDRFTGSGSGTDFTLRISRVEAEDLGIYYCWQGTHFPGTFGGGTKLEIKASTTTPAPRPPTPAPTIASQPLSLRPEACRPAAGGAVHTRGLDFACDFWVLVVVGGVLACYSLLVTVAFIIFWVRSKRSRLLHSDYMNMTPRRPGPTRKHYQPYAPPRDFAAYRSKRGRKKLLYIFKQPFMRPVQTTQEEDGCSCRFPEEEEGGCELRVKFSRSADAPAYKQGQNQLYNELNLGRREEYDVLDKRRGRDPEMGGKPRRKNPQEGLYNELQKDKMAEAYSEIGMKGERRRGKGHDGLYQGLSTATKDTYDALHMQALPPR

SEQ ID NO: 207012 - protein, 482 aa, Artificial Sequence
  Description of Artificial Sequence: Synthetic Chimeric Antigen Receptor
MALPVTALLLPLALLLHAARPEVQLLESGGGLVQPGGSLRLSCAASGFTFSSYAMNWVRQAPGKGLEWVSAISDSGGSRWYADSVKGRFTISRDNSKNTLYLQMNSLRAEDTAVYYCTRYWPMDIWGQGTLVTVSSGGGGSGGGGSGGGGSEIVLTQSPGTLSLSPGERATLSCRASVRVSSTYLAWYQQKPGQAPRLLMYDASIRATGIPDRFSGSGSGTDFTLTISRLEPEDFAVYYCQQYMKWPLTFGQGTKVEIKTTTPAPRPPTPAPTIASQPLSLRPEACRPAAGGAVHTRGLDFACDIYIWAPLAGTCGVLLLSLVITLYCKRGRKKLLYIFKQPFMRPVQTTQEEDGCSCRFPEEEEGGCELRVKFSRSADAPAYQQGQNQLYNELNLGRREEYDVLDKRRGRDPEMGGKPRRKNPQEGLYNELQKDKMAEAYSEIGMKGERRRGKGHDGLYQGLSTATKDTYDALHMQALPPR

SEQ ID NO: 207013 - protein, 668 aa, Artificial Sequence
  Description of Artificial Sequence: Synthetic Chimeric Antigen Receptor
MALPVTALLLPLALLLHAARPEVQLLESGGGLVQPGGSLRLSCAASGFTFSSYAMNWVRQAPGKGLEWVSAISDSGGSRWYADSVKGRFTISRDNSKNTLYLQMNSLRAEDTAVYYCTRYWPMDIWGQGTLVTVSSGGGGSGGGGSGGGGSEIVLTQSPGTLSLSPGERATLSCRASVRVSSTYLAWYQQKPGQAPRLLMYDASIRATGIPDRFSGSGSGTDFTLTISRLEPEDFAVYYCQQYMKWPLTFGQGTKVEIKEPKSPDKTHTCPPCPAPPVAGPSVFLFPPKPKDTLMIARTPEVTCVVVDVSHEDPEVKFNWYVDGVEVHNAKTKPREEQYNSTYRVVSVLTVLHQDWLNGKEYKCKVSNKALPAPIEKTISKAKGQPREPQVYTLPPSRDELTKNQVSLTCLVKGFYPSDIAVEWESNGQPENNYKTTPPVLDSDGSFFLYSKLTVDKSRWQQGNVFSCSVMHEALHNHYTQKSLSLSPGKIYIWAPLAGTCGVLLLSLVITLYCKRGRKKLLYIFKQPFMRPVQTTQEEDGCSCRFPEEEEGGCELRVKFSRSADAPAYQQGQNQLYNELNLGRREEYDVLDKRRGRDPEMGGKPRRKNPQEGLYNELQKDKMAEAYSEIGMKGERRRGKGHDGLYQGLSTATKDTYDALHMQALPPR

SEQ ID NO: 207014 - protein, 487 aa, Artificial Sequence
  Description of Artificial Sequence: Synthetic Chimeric Antigen Receptor
MALPVTALLLPLALLLHAARPQVQLQQSGAELARPGASVKLSCKASGYTFTSYWMQWVKQRPGQGLEWIGAIYPGDGDTRYTQKFKGKATLTADKSSSTAYMQLSSLASEDSAVYYCARGKVYYGSNPFAYWGQGTLVTVSAGGGGSGGGGSGGGGSDIQMTQSSSYLSVSLGGRVTITCKASDHINNWLAWYQQKPGNAPRLLISGATSLETGVPSRFSGSGSGKDYTLSITSLQTEDVATYYCQQYWSTPWTFGGGTKLEIKTTTPAPRPPTPAPTIASQPLSLRPEACRPAAGGAVHTRGLDFACDIYIWAPLAGTCGVLLLSLVITLYCKRGRKKLLYIFKQPFMRPVQTTQEEDGCSCRFPEEEEGGCELRVKFSRSADAPAYQQGQNQLYNELNLGRREEYDVLDKRRGRDPEMGGKPRRKNPQEGLYNELQKDKMAEAYSEIGMKGERRRGKGHDGLYQGLSTATKDTYDALHMQALPPR

SEQ ID NO: 207015 - protein, 432 aa, Artificial Sequence
  Description of Artificial Sequence: Synthetic Chimeric Antigen Receptor
MALPVTALLLPLALLLHAARPEVKLLESGGGLVQPGGSLKLSCAASGFDFSRYWMSWVRQAPGKGLEWIGEINPDSSTINYTPSLKDKFIISRDNAKNTLYLQMSKVRSEDTALYYCARPDGNYWYFDVWGAGTTVTVSSGGGGSGGGGSGGGGSDIVMTQSHKFMSTSVGDRVSITCKASQDVGIAVAWYQQKPGQSPKLLIYWASTRHTGVPDRFTGSGSGTDFTLTISNVQSEDLADYFCQQYSSYPYTFGGGTKLEIKGLAVSTISSFFPPGYQKRGRKKLLYIFKQPFMRPVQTTQEEDGCSCRFPEEEEGGCELRVKFSRSADAPAYQQGQNQLYNELNLGRREEYDVLDKRRGRDPEMGGKPRRKNPQEGLYNELQKDKMAEAYSEIGMKGERRRGKGHDGLYQGLSTATKDTYDALHMQALPPR

SEQ ID NO: 207016 - protein, 433 aa, Artificial Sequence
  Description of Artificial Sequence: Synthetic Chimeric Antigen Receptor
MALPVTALLLPLALLLHAARPQVQLQQPGAELVRPGASVKLSCKASGYSFTTYWMNWVKQRPGQGLEWIGMIHPSDSETRLNQKFKDKATLTVDKSSSTAYMQLSSPTSEDSAVYYCARSTMIATRAMDYWGQGTSVTVSSGGGGSGGGGSGGGGSDIVMTQSQKSMSTSVGDRVSITCKASQDVITGVAWYQQKPGQSPKLLIYSASYRYTGVPDRFTGSGSGTDFTFTISNVQAEDLAVYYCQQHYSTPLTFGAGTKLELKGLAVSTISSFFPPGYQKRGRKKLLYIFKQPFMRPVQTTQEEDGCSCRFPEEEEGGCELRVKFSRSADAPAYQQGQNQLYNELNLGRREEYDVLDKRRGRDPEMGGKPRRKNPQEGLYNELQKDKMAEAYSEIGMKGERRRGKGHDGLYQGLSTATKDTYDALHMQALPPR

SEQ ID NO: 207017 - protein, 433 aa, Artificial Sequence
  Description of Artificial Sequence: Synthetic Chimeric Antigen Receptor
MALPVTALLLPLALLLHAARPQVQLQQSGPELVKPGASVKISCKASGYAFSSSWMNWVKQRPGQGLEWIGRIYPGDGDTKYNGKFKGKATLTADKSSSTAYMQLSSLTSVDSAVYFCARSTMIATGAMDYWGQGTSVTVSSGGGGSGGGGSGGGGSETTVTQSPASLSMAIGEKVTIRCITSTDIDDDMNWYQQKPGEPPKLLISEGNTLRPGVPSRFSSSGYGTDFVFTIENMLSEDVADYYCLQSDNLPLTFGGGTKLEIKGLAVSTISSFFPPGYQKRGRKKLLYIFKQPFMRPVQTTQEEDGCSCRFPEEEEGGCELRVKFSRSADAPAYQQGQNQLYNELNLGRREEYDVLDKRRGRDPEMGGKPRRKNPQEGLYNELQKDKMAEAYSEIGMKGERRRGKGHDGLYQGLSTATKDTYDALHMQALPPR

SEQ ID NO: 207018 - protein, 434 aa, Artificial Sequence
  Description of Artificial Sequence: Synthetic Chimeric Antigen Receptor
MALPVTALLLPLALLLHAARPQVQLQQSGAELARPGASVKLSCKASGYTFTSYWMQWVKQRPGQGLEWIGAIYPGDGDTRYTQKFKGKATLTADKSSSTAYMQLSSLASEDSAVYYCARGKVYYGSNPFAYWGQGTLVTVSAGGGGSGGGGSGGGGSDIQMTQSSSYLSVSLGGRVTITCKASDHINNWLAWYQQKPGNAPRLLISGATSLETGVPSRFSGSGSGKDYTLSITSLQTEDVATYYCQQYWSTPWTFGGGTKLEIKGLAVSTISSFFPPGYQKRGRKKLLYIFKQPFMRPVQTTQEEDGCSCRFPEEEEGGCELRVKFSRSADAPAYQQGQNQLYNELNLGRREEYDVLDKRRGRDPEMGGKPRRKNPQEGLYNELQKDKMAEAYSEIGMKGERRRGKGHDGLYQGLSTATKDTYDALHMQALPPR

SEQ ID NO: 207019 - protein, 434 aa, Artificial Sequence
  Description of Artificial Sequence: Synthetic Chimeric Antigen Receptor
MALPVTALLLPLALLLHAARPQVQLQQSGPELVKPGASVKISCKASGYAFSSSWMNWVKQRPGQGLEWIGRIYPGDGDTKYNGKFKGKATLTADKSSSTAYMQLSSLTSVDSAVYFCARSTMIATGAMDYWGQGTSVTVSSGGGGSGGGGSGGGGSDIVMTQSHKFMSTSVGDRVSITCKASQDVSTAVAWYQQKPGQSPKLLIYSASYRYTGVPDRFTGSGSGTDFTFTISSVQAEDLAVYYCQQHYSTPPYTFGGGTKLEIKGLAVSTISSFFPPGYQKRGRKKLLYIFKQPFMRPVQTTQEEDGCSCRFPEEEEGGCELRVKFSRSADAPAYQQGQNQLYNELNLGRREEYDVLDKRRGRDPEMGGKPRRKNPQEGLYNELQKDKMAEAYSEIGMKGERRRGKGHDGLYQGLSTATKDTYDALHMQALPPR

SEQ ID NO: 207020 - protein, 459 aa, Artificial Sequence
  Description of Artificial Sequence: Synthetic Chimeric Antigen Receptor
MGWSSIILFLVATATGVHSQVQLQQPGAELVRPGASVKLSCKASGYSFTTYWMNWVKQRPGQGLEWIGMIHPSDSETRLNQKFKDKATLTVDKSSSTAYMQLSSPTSEDSAVYYCARSTMIATRAMDYWGQGTSVTVSGGGGSGGGGSGGGGSDIVMTQSQKSMSTSVGDRVSITCKASQDVITGVAWYQQKPGQSPKLLIYSASYRYTGVPDRFTGSGSGTDFTFTISNVQAEDLAVYYCQQHYSTPLTFGAGTKLELKLEPKSCDKTHTCPPCPDPKFWVLVVVGGVLACYSLLVTVAFIIFWVRSKRSRLLHSDYMNMTPRRPGPTRKHYQPYAPPRDFAAYRSRVKFSRSADAPAYQQGQNQLYNELNLGRREEYDVLDKRRGRDPEMGGKPRRKNPQEGLYNELQKDKMAEAYSEIGMKGERRRGKGHDGLYQGLSTATKDTYDALHMQALPPR

SEQ ID NO: 207021 - protein, 485 aa, Artificial Sequence
  Description of Artificial Sequence: Synthetic Chimeric Antigen Receptor
MALPVTALLLPLALLLHAARPEVKLLESGGGLVQPGGSLKLSCAASGFDFSRYWMSWVRQAPGKGLEWIGEINPDSSTINYTPSLKDKFIISRDNAKNTLYLQMSKVRSEDTALYYCARPDGNYWYFDVWGAGTTVTVSSGGGGSGGGGSGGGGSDIVMTQSHKFMSTSVGDRVSITCKASQDVGIAVAWYQQKPGQSPKLLIYWASTRHTGVPDRFTGSGSGTDFTLTISNVQSEDLADYFCQQYSSYPYTFGGGTKLEIKTTTPAPRPPTPAPTIASQPLSLRPEACRPAAGGAVHTRGLDFACDIYIWAPLAGTCGVLLLSLVITLYCKRGRKKLLYIFKQPFMRPVQTTQEEDGCSCRFPEEEEGGCELRVKFSRSADAPAYQQGQNQLYNELNLGRREEYDVLDKRRGRDPEMGGKPRRKNPQEGLYNELQKDKMAEAYSEIGMKGERRRGKGHDGLYQGLSTATKDTYDALHMQALPPR

SEQ ID NO: 207022 - protein, 486 aa, Artificial Sequence
  Description of Artificial Sequence: Synthetic Chimeric Antigen Receptor
MALPVTALLLPLALLLHAARPQVQLQQPGAELVRPGASVKLSCKASGYSFTTYWMNWVKQRPGQGLEWIGMIHPSDSETRLNQKFKDKATLTVDKSSSTAYMQLSSPTSEDSAVYYCARSTMIATRAMDYWGQGTSVTVSSGGGGSGGGGSGGGGSDIVMTQSQKSMSTSVGDRVSITCKASQDVITGVAWYQQKPGQSPKLLIYSASYRYTGVPDRFTGSGSGTDFTFTISNVQAEDLAVYYCQQHYSTPLTFGAGTKLELKTTTPAPRPPTPAPTIASQPLSLRPEACRPAAGGAVHTRGLDFACDIYIWAPLAGTCGVLLLSLVITLYCKRGRKKLLYIFKQPFMRPVQTTQEEDGCSCRFPEEEEGGCELRVKFSRSADAPAYQQGQNQLYNELNLGRREEYDVLDKRRGRDPEMGGKPRRKNPQEGLYNELQKDKMAEAYSEIGMKGERRRGKGHDGLYQGLSTATKDTYDALHMQALPPR

SEQ ID NO: 207023 - protein, 487 aa, Artificial Sequence
  Description of Artificial Sequence: Synthetic Chimeric Antigen Receptor
MALPVTALLLPLALLLHAARPQVQLQQSGPELVKPGASVKISCKASGYAFSSSWMNWVKQRPGQGLEWIGRIYPGDGDTKYNGKFKGKATLTADKSSSTAYMQLSSLTSVDSAVYFCARSTMIATGAMDYWGQGTSVTVSSGGGGSGGGGSGGGGSDIVMTQSHKFMSTSVGDRVSITCKASQDVSTAVAWYQQKPGQSPKLLIYSASYRYTGVPDRFTGSGSGTDFTFTISSVQAEDLAVYYCQQHYSTPPYTFGGGTKLEIKTTTPAPRPPTPAPTIASQPLSLRPEACRPAAGGAVHTRGLDFACDIYIWAPLAGTCGVLLLSLVITLYCKRGRKKLLYIFKQPFMRPVQTTQEEDGCSCRFPEEEEGGCELRVKFSRSADAPAYQQGQNQLYNELNLGRREEYDVLDKRRGRDPEMGGKPRRKNPQEGLYNELQKDKMAEAYSEIGMKGERRRGKGHDGLYQGLSTATKDTYDALHMQALPPR

SEQ ID NO: 207024 - protein, 488 aa, Artificial Sequence
  Description of Artificial Sequence: Synthetic Chimeric Antigen Receptor
MALPVTALLLPLALLLHAARPGSDIQMTQSPSSLSASVGDRVTITCRASQGIRNNLAWYQQKPGKAPKRLIYAASNLQSGVPSRFTGSGSGTEFTLIVSSLQPEDFATYYCLQHHSYPLTSGGGTKVEIKRTGSTSGSGKPGSGEGSEVQVLESGGGLVQPGGSLRLSCAASGFTFSSYAMSWVRQAPGKGLEWVSAISGSGGSTNYADSVKGRFTISRDNSKNTLYLQMNSLRAEDTAVYYCAGSSGWSEYWGQGTLVTVSSASTTTPAPRPPTPAPTIASQPLSLRPEACRPAAGGAVHTRGLDFACDIYIWAPLAGTCGVLLLSLVITLYCKRGRKKLLYIFKQPFMRPVQTTQEEDGCSCRFPEEEEGGCELRVKFSRSADAPAYKQGQNQLYNELNLGRREEYDVLDKRRGRDPEMGGKPRRKNPQEGLYNELQKDKMAEAYSEIGMKGERRRGKGHDGLYQGLSTATKDTYDALHMQALPPR

SEQ ID NO: 207025 - protein, 647 aa, Artificial Sequence
  Description of Artificial Sequence: Synthetic Chimeric Antigen Receptor
MALPVTALLLPLALLLHAARPEVKLLESGGGLVQPGGSLKLSCAASGFDFSRYWMSWVRQAPGKGLEWIGEINPDSSTINYTPSLKDKFIISRDNAKNTLYLQMSKVRSEDTALYYCARPDGNYWYFDVWGAGTTVTVSSGGGGSGGGGSGGGGSDIVMTQSHKFMSTSVGDRVSITCKASQDVGIAVAWYQQKPGQSPKLLIYWASTRHTGVPDRFTGSGSGTDFTLTISNVQSEDLADYFCQQYSSYPYTFGGGTKLEIKEPKSPDKTHTCPPCPAPPVAGPSVFLFPPKPKDTLMIARTPEVTCVVVDVSHEDPEVKFNWYVDGVEVHNAKTKPREEQYNSTYRVVSVLTVLHQDWLNGKEYKCKVSNKALPAPIEKTISKAKGQPREPQVYTLPPSRDELTKNQVSLTCLVKGFYPSDIAVEWESNGQPENNYKTTPPVLDSDGSFFLYSKLTVDKSRWQQGNVFSCSVMHEALHNHYTQKSLSLSPGKKRGRKKLLYIFKQPFMRPVQTTQEEDGCSCRFPEEEEGGCELRVKFSRSADAPAYQQGQNQLYNELNLGRREEYDVLDKRRGRDPEMGGKPRRKNPQEGLYNELQKDKMAEAYSEIGMKGERRRGKGHDGLYQGLSTATKDTYDALHMQALPPR

SEQ ID NO: 207026 - protein, 648 aa, Artificial Sequence
  Description of Artificial Sequence: Synthetic Chimeric Antigen Receptor
MALPVTALLLPLALLLHAARPQVQLQQPGAELVRPGASVKLSCKASGYSFTTYWMNWVKQRPGQGLEWIGMIHPSDSETRLNQKFKDKATLTVDKSSSTAYMQLSSPTSEDSAVYYCARSTMIATRAMDYWGQGTSVTVSSGGGGSGGGGSGGGGSDIVMTQSQKSMSTSVGDRVSITCKASQDVITGVAWYQQKPGQSPKLLIYSASYRYTGVPDRFTGSGSGTDFTFTISNVQAEDLAVYYCQQHYSTPLTFGAGTKLELKEPKSPDKTHTCPPCPAPPVAGPSVFLFPPKPKDTLMIARTPEVTCVVVDVSHEDPEVKFNWYVDGVEVHNAKTKPREEQYNSTYRVVSVLTVLHQDWLNGKEYKCKVSNKALPAPIEKTISKAKGQPREPQVYTLPPSRDELTKNQVSLTCLVKGFYPSDIAVEWESNGQPENNYKTTPPVLDSDGSFFLYSKLTVDKSRWQQGNVFSCSVMHEALHNHYTQKSLSLSPGKKRGRKKLLYIFKQPFMRPVQTTQEEDGCSCRFPEEEEGGCELRVKFSRSADAPAYQQGQNQLYNELNLGRREEYDVLDKRRGRDPEMGGKPRRKNPQEGLYNELQKDKMAEAYSEIGMKGERRRGKGHDGLYQGLSTATKDTYDALHMQALPPR

SEQ ID NO: 207027 - protein, 648 aa, Artificial Sequence
  Description of Artificial Sequence: Synthetic Chimeric Antigen Receptor
MALPVTALLLPLALLLHAARPQVQLQQSGPELVKPGASVKISCKASGYAFSSSWMNWVKQRPGQGLEWIGRIYPGDGDTKYNGKFKGKATLTADKSSSTAYMQLSSLTSVDSAVYFCARSTMIATGAMDYWGQGTSVTVSSGGGGSGGGGSGGGGSETTVTQSPASLSMAIGEKVTIRCITSTDIDDDMNWYQQKPGEPPKLLISEGNTLRPGVPSRFSSSGYGTDFVFTIENMLSEDVADYYCLQSDNLPLTFGGGTKLEIKEPKSPDKTHTCPPCPAPPVAGPSVFLFPPKPKDTLMIARTPEVTCVVVDVSHEDPEVKFNWYVDGVEVHNAKTKPREEQYNSTYRVVSVLTVLHQDWLNGKEYKCKVSNKALPAPIEKTISKAKGQPREPQVYTLPPSRDELTKNQVSLTCLVKGFYPSDIAVEWESNGQPENNYKTTPPVLDSDGSFFLYSKLTVDKSRWQQGNVFSCSVMHEALHNHYTQKSLSLSPGKKRGRKKLLYIFKQPFMRPVQTTQEEDGCSCRFPEEEEGGCELRVKFSRSADAPAYQQGQNQLYNELNLGRREEYDVLDKRRGRDPEMGGKPRRKNPQEGLYNELQKDKMAEAYSEIGMKGERRRGKGHDGLYQGLSTATKDTYDALHMQALPPR

SEQ ID NO: 207028 - protein, 649 aa, Artificial Sequence
  Description of Artificial Sequence: Synthetic Chimeric Antigen Receptor
MALPVTALLLPLALLLHAARPQVQLQQSGAELARPGASVKLSCKASGYTFTSYWMQWVKQRPGQGLEWIGAIYPGDGDTRYTQKFKGKATLTADKSSSTAYMQLSSLASEDSAVYYCARGKVYYGSNPFAYWGQGTLVTVSAGGGGSGGGGSGGGGSDIQMTQSSSYLSVSLGGRVTITCKASDHINNWLAWYQQKPGNAPRLLISGATSLETGVPSRFSGSGSGKDYTLSITSLQTEDVATYYCQQYWSTPWTFGGGTKLEIKEPKSPDKTHTCPPCPAPPVAGPSVFLFPPKPKDTLMIARTPEVTCVVVDVSHEDPEVKFNWYVDGVEVHNAKTKPREEQYNSTYRVVSVLTVLHQDWLNGKEYKCKVSNKALPAPIEKTISKAKGQPREPQVYTLPPSRDELTKNQVSLTCLVKGFYPSDIAVEWESNGQPENNYKTTPPVLDSDGSFFLYSKLTVDKSRWQQGNVFSCSVMHEALHNHYTQKSLSLSPGKKRGRKKLLYIFKQPFMRPVQTTQEEDGCSCRFPEEEEGGCELRVKFSRSADAPAYQQGQNQLYNELNLGRREEYDVLDKRRGRDPEMGGKPRRKNPQEGLYNELQKDKMAEAYSEIGMKGERRRGKGHDGLYQGLSTATKDTYDALHMQALPPR

SEQ ID NO: 207029 - protein, 649 aa, Artificial Sequence
  Description of Artificial Sequence: Synthetic Chimeric Antigen Receptor
MALPVTALLLPLALLLHAARPQVQLQQSGPELVKPGASVKISCKASGYAFSSSWMNWVKQRPGQGLEWIGRIYPGDGDTKYNGKFKGKATLTADKSSSTAYMQLSSLTSVDSAVYFCARSTMIATGAMDYWGQGTSVTVSSGGGGSGGGGSGGGGSDIVMTQSHKFMSTSVGDRVSITCKASQDVSTAVAWYQQKPGQSPKLLIYSASYRYTGVPDRFTGSGSGTDFTFTISSVQAEDLAVYYCQQHYSTPPYTFGGGTKLEIKEPKSPDKTHTCPPCPAPPVAGPSVFLFPPKPKDTLMIARTPEVTCVVVDVSHEDPEVKFNWYVDGVEVHNAKTKPREEQYNSTYRVVSVLTVLHQDWLNGKEYKCKVSNKALPAPIEKTISKAKGQPREPQVYTLPPSRDELTKNQVSLTCLVKGFYPSDIAVEWESNGQPENNYKTTPPVLDSDGSFFLYSKLTVDKSRWQQGNVFSCSVMHEALHNHYTQKSLSLSPGKKRGRKKLLYIFKQPFMRPVQTTQEEDGCSCRFPEEEEGGCELRVKFSRSADAPAYQQGQNQLYNELNLGRREEYDVLDKRRGRDPEMGGKPRRKNPQEGLYNELQKDKMAEAYSEIGMKGERRRGKGHDGLYQGLSTATKDTYDALHMQALPPR

SEQ ID NO: 207030 - protein, 271 aa, Artificial Sequence
  Description of Artificial Sequence: Synthetic polypeptide
MALPVTALLLPLALLLHAARPDIQMTQTTSSLSASLGDRVTISCRASQDISKYLNWYQQKPDGTVKLLIYHTSRLHSGVPSRFSGSGSGTDYSLTISNLEQEDIATYFCQQGNTLPYTFGGGTKLEITGGGGSGGGGSGGGGSEVKLQESGPGLVAPSQSLSVTCTVSGVSLPDYGVSWIRQPPRKGLEWLGVIWGSETTYYNSALKSRLTIIKDNSKSQVFLKMNSLQTDDTAIYYCAKHYYYGGSYAMDYWGQGTSVTVSSHHHHHHHH

SEQ ID NO: 207031 - protein, 719 aa, Artificial Sequence
  Description of Artificial Sequence: Synthetic Chimeric Antigen Receptor
ADAPAYQQGQNQLYNELNLGRREEYDVLDKRRGRDPEMGGKPRRKNPQEGLYNELQKDKMAEAYSEIGMKGERRRGKGHDGLYQGLSTATKDTYDALHMQALPPRRAEGRGSLLTCGDVEENPGPMAVPTQVLGLLLLWLTDARCDIQMTQSPSSLSASVGDRVTITCRASEDIYFNLVWYQQKPGKAPKLLIYDTNRLADGVPSRFSGSGSGTQYTLTISSLQPEDFATYYCQHYKNYPLTFGQGTKLEIKRSGGGGSGGGGSGGGGSRSEVQLVESGGGLVQPGGSLRLSCAASGFTLSNYGMHWIRQAPGKGLEWVSSISLNGGSTYYRDSVKGRFTISRDNAKSTLYLQMNSLRAEDTAVYYCAAQDAYTGGYFDYWGQGTLVTVSSMPCPAPPVAGPSVFLFPPKPKDTLMIARTPEVTCVVVDVSHEDPEVKFNWYVDGVEVHNAKTKPREEQYNSTYRVVSVLTVLHQDWLNGKEYKCKVSNKALPAPIEKTISKAKPCPAPPVAGPSVFLFPPKPKDTLMIARTPEVTCVVVDVSHEDPEVKFNWYVDGVEVHNAKTKPREEQYNSTYRVVSVLTVLHQDWLNGKEYKCKVSNKALPAPIEKTISKAKMALIVLGGVAGLLLFIGLGIFFMALIVLGGVAGLLLFIGLGIFFCVRCRHRRRSGGGGSSHIQIPPGLTELLQGYTVEVLRQQPPDLVEFAVEYFTRLREARA

SEQ ID NO: 207032 - protein, 671 aa, Artificial Sequence
  Description of Artificial Sequence: Synthetic Chimeric Antigen Receptor
MLTSLLCWMALCLLGADHADACPYSNPSLCSGGGGSELPTQGTFSNVSTNVSPAKPTTTACPYSNPSLCSGGGGSPAPRPPTPAPTIASQPLSLRPEACRPAAGGAVHTRGLDFACDIYIWAPLAGTCGVLLLSLVITLYCNHRNRRRVCKCPRPVVRAEGRGSLLTCGDVEENPGPMETDTLLLWVLLLWVPGSTGDIQMTQTTSSLSASLGDRVTISCRASQDISKYLNWYQQKPDGTVKLLIYHTSRLHSGVPSRFSGSGSGTDYSLTISNLEQEDIATYFCQQGNTLPYTFGGGTKLEITKAGGGGSGGGGSGGGGSGGGGSEVKLQESGPGLVAPSQSLSVTCTVSGVSLPDYGVSWIRQPPRKGLEWLGVIWGSETTYYNSALKSRLTIIKDNSKSQVFLKMNSLQTDDTAIYYCAKHYYYGGSYAMDYWGQGTSVTVSSDPTTTPAPRPPTPAPTIASQPLSLRPEACRPAAGGAVHTRGLDFACDIYIWAPLAGTCGVLLLSLVITLYCKRGRKKLLYIFKQPFMRPVQTTQEEDGCSCRFPEEEEGGCELRVKFSRSADAPAYQQGQNQLYNELNLGRREEYDVLDKRRGRDPEMGGKPRRKNPQEGLYNELQKDKMAEAYSEIGMKGERRRGKGHDGLYQGLSTATKDTYDALHMQALPPR

SEQ ID NO: 207033 - protein, 461 aa, Artificial Sequence
  Description of Artificial Sequence: Synthetic Chimeric Antigen Receptor
EVQVLESGGGLVQPGGSLRLSCAASGFTFSSYAMSWVRQAPGKGLEWVSAISGSGGSTNYADSVKGRFTISRDNSKNTLYLQMNSLRAEDTAVYYCAGSSGWSEYWGQGTLVTVSSGGGGSGGGGSGGGGSDIQMTQSPSSLSASVGDRVTITCRASQGIRNNLAWYQQKPGKAPKRLIYAASNLQSGVPSRFTGSGSGTEFTLIVSSLQPEDFATYYCLQHHSYPLTSGGGTKVEIKTTTPAPRPPTPAPTIASQPLSLRPEACRPAAGGAVHTRGLDFACDIYIWAPLAGTCGVLLLSLVITLYCKRGRKKLLYIFKQPFMRPVQTTQEEDGCSCRFPEEEEGGCELRVKFSRSADAPAYQQGQNQLYNELNLGRREEYDVLDKRRGRDPEMGGKPRRKNPQEGLYNELQKDKMAEAYSEIGMKGERRRGKGHDGLYQGLSTATKDTYDALHMQALPPR

SEQ ID NO: 207034 - protein, 554 aa, Artificial Sequence
  Description of Artificial Sequence: Synthetic Chimeric Antigen Receptor
MKHLWFFLLLVAAPRWVLSQVQLQESGPGLVKPSETLSLTCTVSGGSISSSSYYWGWIRQPPGKGLEWIGSIYYSGSTYYNPSLKSRVTISVDTSKNQFSLKLSSVTAADTAVYYCARLPMVTMSFDYWGQGTLVTVSRGGGGSGGGGSGGGGSMASYVLTQPPSVSVAPGKTARITCGGNNIGSKSVHWYQQKPGQAPVLVIYYDSDRPSGIPERFSGSNSGNTATLTISRVEAGDEADYYCQVWDSSSDHVVFGGGTKLTVLGQPKAAPSVTLFPPSSEELQANKATLVCLISDFYPGAVTVAWKADSSPVKAGVETTTPSKQSNNKYAASSYLSLTPEQWKSHRSYSCQVTHEGSTVEKTVAPTECSTRFWVLVVVGGVLACYSLLVTVAFIIFWVRSKRSRLLHSDYMNMTPRRPGPTRKHYQPYAPPRDFAAYRSLRVKFSRSADAPAYQQGQNQLYNELNLGRREEYDVLDKRRGRDPEMGGKPQRRKNPQEGLYNELQKDKMAEAYSEIGMKGERRRGKGHDGLYQGLSTATKDTYDALHMQALPPR

SEQ ID NO: 207035 - protein, 563 aa, Artificial Sequence
  Description of Artificial Sequence: Synthetic Chimeric Antigen Receptor
MKHLWFFLLLVAAPRWVLSQVQLQESGPGLVKPSETLSLTCTVSGGSISSSSYYWGWIRQPPGKGLEWIGSIYYSGSTYYNPSLKSRVTISVDTSKNQFSLKLSSVTAADTAVYYCARLPMVTMSFDYWGQGTLVTVSRGGGGSGGGGSGGGGSMASYVLTQPPSVSVAPGKTARITCGGNNIGSKSVHWYQQKPGQAPVLVIYYDSDRPSGIPERFSGSNSGNTATLTISRVEAGDEADYYCQVWDSSSDHVVFGGGTKLTVLGQPKAAPSVTLFPPSSEELQANKATLVCLISDFYPGAVTVAWKADSSPVKAGVETTTPSKQSNNKYAASSYLSLTPEQWKSHRSYSCQVTHEGSTVEKTVAPTECSTRFWVLVVVGGVLACYSLLVTVAFIIFWVRLRVKFSRSADAPAYQQGQNQLYNELNLGRREEYDVLDKRRGRDPEMGGKPQRRKNPQEGLYNELQKDKMAEAYSEIGMKGERRRGKGHDGLYQGLSTATKDTYDALHMQALPPRRSQCMWPRETQLLLEVPPSTEDARSCQFPEEERGERSAEEKGRLGDLWV

SEQ ID NO: 207036 - protein, 603 aa, Artificial Sequence
  Description of Artificial Sequence: Synthetic Chimeric Antigen Receptor
MKHLWFFLLLVAAPRWVLSQVQLQESGPGLVKPSETLSLTCTVSGGSISSSSYYWGWIRQPPGKGLEWIGSIYYSGSTYYNPSLKSRVTISVDTSKNQFSLKLSSVTAADTAVYYCARLPMVTMSFDYWGQGTLVTVSRGGGGSGGGGSGGGGSMASYVLTQPPSVSVAPGKTARITCGGNNIGSKSVHWYQQKPGQAPVLVIYYDSDRPSGIPERFSGSNSGNTATLTISRVEAGDEADYYCQVWDSSSDHVVFGGGTKLTVLGQPKAAPSVTLFPPSSEELQANKATLVCLISDFYPGAVTVAWKADSSPVKAGVETTTPSKQSNNKYAASSYLSLTPEQWKSHRSYSCQVTHEGSTVEKTVAPTECSTRFWVLVVVGGVLACYSLLVTVAFIIFWVRSKRSRLLHSDYMNMTPRRPGPTRKHYQPYAPPRDFAAYRSLRVKFSRSADAPAYQQGQNQLYNELNLGRREEYDVLDKRRGRDPEMGGKPQRRKNPQEGLYNELQKDKMAEAYSEIGMKGERRRGKGHDGLYQGLSTATKDTYDALHMQALPPRRSQCMWPRETQLLLEVPPSTEDARSCQFPEEERGERSAEEKGRLGDLWV

SEQ ID NO: 207037 - protein, 603 aa, Artificial Sequence [sequence omitted]

SEQ ID NO: 207038 - protein, 603 aa, Artificial Sequence [sequence omitted]

SEQ ID NO: 207039 - protein, 484 aa, Artificial Sequence
  Description of Artificial Sequence: Synthetic Chimeric Antigen Receptor
MALPVTALLLPLALLLHAARPDIQMTQSPSSLSASVGDRVTITCRASQGIRNNLAWYQQKPGKAPKRLIYAASNLQSGVPSRFTGSGSGTEFTLIVSSLQPEDFATYYCLQHHSYPLTSGGGTKVEIKRTGSTSGSGKPGSGEGSEVQVLESGGGLVQPGGSLRLSCAASGFTFSSYAMSWVRQAPGKGLEWVSAISGSGGSTNYADSVKGRFTISRDNSKNTLYLQMNSLRAEDTAVYYCAGSSGWSEYWGQGTLVTVSSTTTPAPRPPTPAPTIASQPLSLRPEACRPAAGGAVHTRGLDFACDIYIWAPLAGTCGVLLLSLVITLYCKRGRKKLLYIFKQPFMRPVQTTQEEDGCSCRFPEEEEGGCELRVKFSRSADAPAYKQGQNQLYNELNLGRREEYDVLDKRRGRDPEMGGKPRRKNPQEGLYNELQKDKMAEAYSEIGMKGERRRGKGHDGLYQGLSTATKDTYDALHMQALPPR

SEQ ID NO: 207040 - protein, 491 aa, Artificial Sequence
  Description of Artificial Sequence: Synthetic Chimeric Antigen Receptor
MALPVTALLLPLALLLHAARPGSEIQLQQSGAELVKPGASVKLSCTGSGFNIEDYYIHWVKQRTEQGLEWIGRIDPENDETKYGPIFQGRATITADTSSNTVYLQLSSLTSEDTAVYYCAFRGGVYWGPGTTLTVSSGGGGSGGGGSGGGGSHMDVVMTQSPLTLSVAIGQSASISCKSSQSLLDSDGKTYLNWLLQRPGQSPKRLISLVSKLDSGVPDRFTGSGSGTDFTLRISRVEAEDLGIYYCWQGTHFPGTFGGGTKLEIKASTTTPAPRPPTPAPTIASQPLSLRPEACRPAAGGAVHTRGLDFACDIYIWAPLAGTCGVLLLSLVITLYCKRGRKKLLYIFKQPFMRPVQTTQEEDGCSCRFPEEEEGGCELRVKFSRSADAPAYKQGQNQLYNELNLGRREEYDVLDKRRGRDPEMGGKPRRKNPQEGLYNELQKDKMAEAYSEIGMKGERRRGKGHDGLYQGLSTATKDTYDALHMQALPPR

SEQ ID NO: 207041 - protein, 490 aa, Artificial Sequence
  Description of Artificial Sequence: Synthetic Chimeric Antigen Receptor
MALPVTALLLPLALLLHAARPDVVMTQSPDSLAVSLGERATINCKSSQSLLDSDGKTYLNWLQQKPGQPPKRLISLVSKLDSGVPDRFSGSGSGTDFTLTISSLQAEDVAVYYCWQGTHFPGTFGGGTKVEIKGGGGSGGGGSGGGGSGGGGSEIQLVQSGAEVKKPGATVKISCKGSGFNIEDYYIHWVQQAPGKGLEWMGRIDPENDETKYGPIFQGRVTITADTSTNTVYMELSSLRSEDTAVYYCAFRGGVYWGQGTTVTVSSTTTPAPRPPTPAPTIASQPLSLRPEACRPAAGGAVHTRGLDFACDIYIWAPLAGTCGVLLLSLVITLYCKRGRKKLLYIFKQPFMRPVQTTQEEDGCSCRFPEEEEGGCELRVKFSRSADAPAYKQGQNQLYNELNLGRREEYDVLDKRRGRDPEMGGKPRRKNPQEGLYNELQKDKMAEAYSEIGMKGERRRGKGHDGLYQGLSTATKDTYDALHMQALPPR

SEQ ID NO: 207042 - protein, 490 aa, Artificial Sequence
  Description of Artificial Sequence: Synthetic Chimeric Antigen Receptor
MALPVTALLLPLALLLHAARPEIQLVQSGAEVKKPGESLRISCKGSGFNIEDYYIHWVRQMPGKGLEWMGRIDPENDETKYGPIFQGHVTISADTSINTVYLQWSSLKASDTAMYYCAFRGGVYWGQGTTVTVSSGGGGSGGGGSGGGGSGGGGSDVVMTQSPLSLPVTLGQPASISCKSSQSLLDSDGKTYLNWLQQRPGQSPRRLISLVSKLDSGVPDRFSGSGSGTDFTLKISRVEAEDVGVYYCWQGTHFPGTFGGGTKVEIKTTTPAPRPPTPAPTIASQPLSLRPEACRPAAGGAVHTRGLDFACDIYIWAPLAGTCGVLLLSLVITLYCKRGRKKLLYIFKQPFMRPVQTTQEEDGCSCRFPEEEEGGCELRVKFSRSADAPAYKQGQNQLYNELNLGRREEYDVLDKRRGRDPEMGGKPRRKNPQEGLYNELQKDKMAEAYSEIGMKGERRRGKGHDGLYQGLSTATKDTYDALHMQALPPR

SEQ ID NO: 207043 - protein, 490 aa, Artificial Sequence
  Description of Artificial Sequence: Synthetic Chimeric Antigen Receptor
MALPVTALLLPLALLLHAARPDVVMTQSPLSLPVTLGQPASISCKSSQSLLDSDGKTYLNWLQQRPGQSPRRLISLVSKLDSGVPDRFSGSGSGTDFTLKISRVEAEDVGVYYCWQGTHFPGTFGGGTKVEIKGGGGSGGGGSGGGGSGGGGSEIQLVQSGAEVKKPGESLRISCKGSGFNIEDYYIHWVRQMPGKGLEWMGRIDPENDETKYGPIFQGHVTISADTSINTVYLQWSSLKASDTAMYYCAFRGGVYWGQGTTVTVSSTTTPAPRPPTPAPTIASQPLSLRPEACRPAAGGAVHTRGLDFACDIYIWAPLAGTCGVLLLSLVITLYCKRGRKKLLYIFKQPFMRPVQTTQEEDGCSCRFPEEEEGGCELRVKFSRSADAPAYKQGQNQLYNELNLGRREEYDVLDKRRGRDPEMGGKPRRKNPQEGLYNELQKDKMAEAYSEIGMKGERRRGKGHDGLYQGLSTATKDTYDALHMQALPPR

SEQ ID NO: 207044 - protein, 490 aa, Artificial Sequence
  Description of Artificial Sequence: Synthetic Chimeric Antigen Receptor
MALPVTALLLPLALLLHAARPEIQLVQSGAEVKKPGATVKISCKGSGFNIEDYYIHWVQQAPGKGLEWMGRIDPENDETKYGPIFQGRVTITADTSTNTVYMELSSLRSEDTAVYYCAFRGGVYWGQGTTVTVSSGGGGSGGGGSGGGGSGGGGSDVVMTQSPLSLPVTLGQPASISCKSSQSLLDSDGKTYLNWLQQRPGQSPRRLISLVSKLDSGVPDRFSGSGSGTDFTLKISRVEAEDVGVYYCWQGTHFPGTFGGGTKVEIKTTTPAPRPPTPAPTIASQPLSLRPEACRPAAGGAVHTRGLDFACDIYIWAPLAGTCGVLLLSLVITLYCKRGRKKLLYIFKQPFMRPVQTTQEEDGCSCRFPEEEEGGCELRVKFSRSADAPAYKQGQNQLYNELNLGRREEYDVLDKRRGRDPEMGGKPRRKNPQEGLYNELQKDKMAEAYSEIGMKGERRRGKGHDGLYQGLSTATKDTYDALHMQALPPR

SEQ ID NO: 207045 - protein, 490 aa, Artificial Sequence
  Description of Artificial Sequence: Synthetic Chimeric Antigen Receptor
MALPVTALLLPLALLLHAARPEIQLVQSGAEVKKPGESLRISCKGSGFNIEDYYIHWVRQMPGKGLEWMGRIDPENDETKYGPIFQGHVTISADTSINTVYLQWSSLKASDTAMYYCAFRGGVYWGQGTTVTVSSGGGGSGGGGSGGGGSGGGGSDVVMTQSPDSLAVSLGERATINCKSSQSLLDSDGKTYLNWLQQKPGQPPKRLISLVSKLDSGVPDRFSGSGSGTDFTLTISSLQAEDVAVYYCWQGTHFPGTFGGGTKVEIKTTTPAPRPPTPAPTIASQPLSLRPEACRPAAGGAVHTRGLDFACDIYIWAPLAGTCGVLLLSLVITLYCKRGRKKLLYIFKQPFMRPVQTTQEEDGCSCRFPEEEEGGCELRVKFSRSADAPAYKQGQNQLYNELNLGRREEYDVLDKRRGRDPEMGGKPRRKNPQEGLYNELQKDKMAEAYSEIGMKGERRRGKGHDGLYQGLSTATKDTYDALHMQALPPR

SEQ ID NO: 207046 - protein, 490 aa, Artificial Sequence
  Description of Artificial Sequence: Synthetic Chimeric Antigen Receptor
MALPVTALLLPLALLLHAARPDVVMTQSPDSLAVSLGERATINCKSSQSLLDSDGKTYLNWLQQKPGQPPKRLISLVSKLDSGVPDRFSGSGSGTDFTLTISSLQAEDVAVYYCWQGTHFPGTFGGGTKVEIKGGGGSGGGGSGGGGSGGGGSEIQLVQSGAEVKKPGESLRISCKGSGFNIEDYYIHWVRQMPGKGLEWMGRIDPENDETKYGPIFQGHVTISADTSINTVYLQWSSLKASDTAMYYCAFRGGVYWGQGTTVTVSSTTTPAPRPPTPAPTIASQPLSLRPEACRPAAGGAVHTRGLDFACDIYIWAPLAGTCGVLLLSLVITLYCKRGRKKLLYIFKQPFMRPVQTTQEEDGCSCRFPEEEEGGCELRVKFSRSADAPAYKQGQNQLYNELNLGRREEYDVLDKRRGRDPEMGGKPRRKNPQEGLYNELQKDKMAEAYSEIGMKGERRRGKGHDGLYQGLSTATKDTYDALHMQALPPR

SEQ ID NO: 207047 - protein, 490 aa, Artificial Sequence
  Description of Artificial Sequence: Synthetic Chimeric Antigen Receptor
MALPVTALLLPLALLLHAARPDVVMTQSPLSLPVTLGQPASISCKSSQSLLDSDGKTYLNWLQQRPGQSPRRLISLVSKLDSGVPDRFSGSGSGTDFTLKISRVEAEDVGVYYCWQGTHFPGTFGGGTKVEIKGGGGSGGGGSGGGGSGGGGSEIQLVQSGAEVKKPGATVKISCKGSGFNIEDYYIHWVQQAPGKGLEWMGRIDPENDETKYGPIFQGRVTITADTSTNTVYMELSSLRSEDTAVYYCAFRGGVYWGQGTTVTVSSTTTPAPRPPTPAPTIASQPLSLRPEACRPAAGGAVHTRGLDFACDIYIWAPLAGTCGVLLLSLVITLYCKRGRKKLLYIFKQPFMRPVQTTQEEDGCSCRFPEEEEGGCELRVKFSRSADAPAYKQGQNQLYNELNLGRREEYDVLDKRRGRDPEMGGKPRRKNPQEGLYNELQKDKMAEAYSEIGMKGERRRGKGHDGLYQGLSTATKDTYDALHMQALPPR

SEQ ID NO: 207048 - protein, 487 aa, Artificial Sequence
  Description of Artificial Sequence: Synthetic Chimeric Antigen Receptor
MALPVTALLLPLALLLHAARPEIQLQQSGAELVKPGASVKLSCTGSGFNIEDYYIHWVKQRTEQGLEWIGRIDPENDETKYGPIFQGRATITADTSSNTVYLQLSSLTSEDTAVYYCAFRGGVYWGPGTTLTVSSGGGGSGGGGSGGGGSHMDVVMTQSPLTLSVAIGQSASISCKSSQSLLDSDGKTYLNWLLQRPGQSPKRLISLVSKLDSGVPDRFTGSGSGTDFTLRISRVEAEDLGIYYCWQGTHFPGTFGGGTKLEIKTTTPAPRPPTPAPTIASQPLSLRPEACRPAAGGAVHTRGLDFACDIYIWAPLAGTCGVLLLSLVITLYCKRGRKKLLYIFKQPFMRPVQTTQEEDGCSCRFPEEEEGGCELRVKFSRSADAPAYKQGQNQLYNELNLGRREEYDVLDKRRGRDPEMGGKPRRKNPQEGLYNELQKDKMAEAYSEIGMKGERRRGKGHDGLYQGLSTATKDTYDALHMQALPPR

SEQ ID NO: 207049 - protein, 490 aa, Artificial Sequence
  Description of Artificial Sequence: Synthetic Chimeric Antigen Receptor
MALPVTALLLPLALLLHAARPEIQLVQSGAEVKKPGATVKISCKGSGFNIEDYYIHWVQQAPGKGLEWMGRIDPENDETKYGPIFQGRVTITADTSTNTVYMELSSLRSEDTAVYYCAFRGGVYWGQGTTVTVSSGGGGSGGGGSGGGGSGGGGSDVVMTQSPDSLAVSLGERATINCKSSQSLLDSDGKTYLNWLQQKPGQPPKRLISLVSKLDSGVPDRFSGSGSGTDFTLTISSLQAEDVAVYYCWQGTHFPGTFGGGTKVEIKTTTPAPRPPTPAPTIASQPLSLRPEACRPAAGGAVHTRGLDFACDIYIWAPLAGTCGVLLLSLVITLYCKRGRKKLLYIFKQPFMRPVQTTQEEDGCSCRFPEEEEGGCELRVKFSRSADAPAYKQGQNQLYNELNLGRREEYDVLDKRRGRDPEMGGKPRRKNPQEGLYNELQKDKMAEAYSEIGMKGERRRGKGHDGLYQGLSTATKDTYDALHMQALPPR

SEQ ID NO: 207050 - protein, 439 aa, Artificial Sequence
  Description of Artificial Sequence: Synthetic Chimeric Antigen Receptor
MALPVTALLLPLALLLHAARPDIQMTQSPSSLSASVGDRVTITCRASQGIRNNLAWYQQKPGKAPKRLIYAASNLQSGVPSRFTGSGSGTEFTLIVSSLQPEDFATYYCLQHHSYPLTSGGGTKVEIKRTGSTSGSGKPGSGEGSEVQVLESGGGLVQPGGSLRLSCAASGFTFSSYAMSWVRQAPGKGLEWVSAISGSGGSTNYADSVKGRFTISRDNSKNTLYLQMNSLRAEDTAVYYCAGSSGWSEYWGQGTLVTVSSTTTPAPRPPTPAPTIASQPLSLRPEACRPAAGGAVHTRGLDFACDIYIWAPLAGTCGVLLLSLVITLYCKRGRKKLLGGGGSGGGGSKRDHHHHHHQDKKTMMMNEEDDGNGMDELLAVLGYKVRSSEMADVAQKLEQLEVMMSNVQEDDLSQLATETVHYNPAELYTWLDSMLTDLN

SEQ ID NO: 207051 - protein, 446 aa, Artificial Sequence
  Description of Artificial Sequence: Synthetic Chimeric Antigen Receptor
MALPVTALLLPLALLLHAARPDIQMTQSPSSLSASVGDRVTITCRASQGIRNNLAWYQQKPGKAPKRLIYAASNLQSGVPSRFTGSGSGTEFTLIVSSLQPEDFATYYCLQHHSYPLTSGGGTKVEIKRTGSTSGSGKPGSGEGSEVQVLESGGGLVQPGGSLRLSCAASGFTFSSYAMSWVRQAPGKGLEWVSAISGSGGSTNVADSVKGRFTISRDNSKNTLVLQMNSLRAEDTAVYYCAGSSGWSEYWGQGTLVTVSSKRGRKKLLGGGGSGGGGSASRILWHEMWHEGLEEASRLYFGERNVKGMFEVLEPLHAMMERGPQTLKETSFNQAYGRDLMEAQEWCRKYMKSGNVKDLLQAWDLYYHVFRRISKTSTTTPAPRPPTPAPTIASQPLSLRPEACRPAAGGAVHTRGLDFACDIYIWAPLAGTCGVLLLSLVITLYC

SEQ ID NO: 207052 - protein, 446 aa, Artificial Sequence
  Description of Artificial Sequence: Synthetic Chimeric Antigen Receptor
MALPVTALLLPLALLLHAARPDIQMTQSPSSLSASVGDRVTITCRASQGIRNNLAWYQQKPGKAPKRLIYAASNLQSGVPSRFTGSGSGTEFTLIVSSLQPEDFATYYCLQHHSYPLTSGGGTKVEIKRTGSTSGSGKPGSGEGSEVQVLESGGGLVQPGGSLRLSCAASGFTFSSYAMSWVRQAPGKGLEWVSAISGSGGSTNYADSVKGRFTISRDNSKNTLYLQMNSLRAEDTAVYYCAGSSGWSEYWGQGTLVTVSSTTTPAPRPPTPAPTIASQPLSLRPEACRPAAGGAVHTRGLDFACDIYIWAPLAGTCGVLLLSLVITLYCKRGRKKLLGGGGSGGGGSASRILWHEMWHEGLEEASRLYFGERNVKGMFEVLEPLHAMMERGPQTLKETSFNQAYGRDLMEAQEWCRKYMKSGNVKDLLQAWDLYYHVFRRISKTS

SEQ ID NO: 207053 - protein, 456 aa, Artificial Sequence
  Description of Artificial Sequence: Synthetic Chimeric Antigen Receptor
MALPVTALLLPLALLLHAARPDIQMTQSPSSLSASVGDRVTITCRASQGIRNNLAWYQQKPGKAPKRLIYAASNLQSGVPSRFTGSGSGTEFTLIVSSLQPEDFATYYCLQHHSYPLTSGGGTKVEIKRTGSTSGSGKPGSGEGSEVQVLESGGGLVQPGGSLRLSCAASGFTFSSYAMSWVRQAPGKGLEWVSAISGSGGSTNYADSVKGRFTISRDNSKNTLYLQMNSLRAEDTAVYYCAGSSGWSEYWGQGTLVTVSSKRGRKKLLGGGGSGGGSGVQVETISPGDGRTFPKRGQTCVVHYTGMLEDGKKFDSSRDRNKPFKFMLGKQEVIRGWEEGVAQMSVGQRAKLTISPDYAYGATGHPGIIPPHATLVFDVELLKLETSTTTPAPRPPTPAPTIASQPLSLRPEACRPAAGGAVHTRGLDFACDIYIWAPLAGTCGVLLLSLVITLYC

SEQ ID NO: 207054 - protein, 457 aa, Artificial Sequence
  Description of Artificial Sequence: Synthetic Chimeric Antigen Receptor
MALPVTALLLPLALLLHAARPDIQMTQSPSSLSASVGDRVTITCRASQGIRNNLAWYQQKPGKAPKRLIYAASNLQSGVPSRFTGSGSGTEFTLIVSSLQPEDFATYYCLQHHSYPLTSGGGTKVEIKRTGSTSGSGKPGSGEGSEVQVLESGGGLVQPGGSLRLSCAASGFTFSSYAMSWVRQAPGKGLEWVSAISGSGGSTNYADSVKGRFTISRDNSKNTLYLQMNSLRAEDTAVYYCAGSSGWSEYWGQGTLVTVSSTTTPAPRPPTPAPTIASQPLSLRPEACRPAAGGAVHTRGLDFACDIYIWAPLAGTCGVLLLSLVITLYCKRGRKKLLGGGGSGGGGSGVQVETISPGDGRTFPKRGQTCVVHYTGMLEDGKKFDSSRDRNKPFKFMLGKQEVIRGWEEGVAQMSVGQRAKLTISPDYAYGATGHPGIIPPHATLVFDVELLKLETS

SEQ ID NO: 207055 - protein, 464 aa, Artificial Sequence
  Description of Artificial Sequence: Synthetic Chimeric Antigen Receptor
QVQLQQSGGGLVKPGASLKLSCVTSGFTFRKFGMSWVRQTSDKRLEWVASISTGGYNTYYSDNVKGRFTISRENAKNTLYLQMSSLKSEDTALYYCTRGYSSTSYAMDYWGQGTTVTVGGGGSGGGGSGGGGSDIELTQSPASLSVATGEKVTIRCMTSTDIDDDMNWYQQKPGEPPKFLISEGNTLRPGVPSRFSSSGTGTDFVFTIENTLSEDVGDYYCLQSFNVPLTFGDGTKLEKALTTTPAPRPPTPAPTIASQPLSLRPEACRPAAGGAVHTRGLDFACDIYIWAPLAGTCGVLLLSLVITLYCKRGRKKLLYIFKQPFMRPVQTTQEEDGCSCRFPEEEEGGCELRVKFSRSADAPAYQQGQNQLYNELNLGRREEYDVLDKRRGRDPEMGGKPRRKNPQEGLYNELQKDKMAEAYSEIGMKGERRRGKGHDGLYQGLSTATKDTYDALHMQALPPR

SEQ ID NO: 207056 - protein, 482 aa, Artificial Sequence
  Description of Artificial Sequence: Synthetic Chimeric Antigen Receptor
MALPVTALLLPLALLLHAARPDIQMTQSPSSLSASVGDRVTITCRASQGIRNNLAWYQQKPGKAPKRLIYAASNLQSGVPSRFTGSGSGTEFTLIVSSLQPEDFATYYCLQHHSYPLTSGGGTKVEIKGGGGSGGGGSGGGGSEVQVLESGGGLVQPGGSLRLSCAASGFTFSSYAMSWVRQAPGKGLEWVSAISGSGGSTNYADSVKGRFTISRDNSKNTLYLQMNSLRAEDTAVYYCAGSSGWSEYWGQGTLVTVSSTTTPAPRPPTPAPTIASQPLSLRPEACRPAAGGAVHTRGLDFACDIYIWAPLAGTCGVLLLSLVITLYCKRGRKKLLYIFKQPFMRPVQTTQEEDGCSCRFPEEEEGGCELRVKFSRSADAPAYQQGQNQLYNELNLGRREEYDVLDKRRGRDPEMGGKPRRKNPQEGLYNELQKDKMAEAYSEIGMKGERRRGKGHDGLYQGLSTATKDTYDALHMQALPPR

SEQ ID NO: 207057 - protein, 484 aa, Artificial Sequence
  Description of Artificial Sequence: Synthetic Chimeric Antigen Receptor
MVLLVTSLLLCELPHPAFLLIPDIQMTQSPSSLSASVGDRVTITCRASQGIRNNLAWYQQKPGKAPKRLIYAASNLQSGVPSRFTGSGSGTEFTLIVSSLQPEDFATYYCLQHHSYPLTSGGGTKVEIKRTGSTSGSGKPGSGEGSEVQVLESGGGLVQPGGSLRLSCAASGFTFSSYAMSWVRQAPGKGLEWVSAISGSGGSTNYADSVKGRFTISRDNSKNTLYLQMNSLRAEDTAVYYCAGSSGWSEYWGQGTLVTVSSAAAIEVMYPPPYLDNEKSNGTIIHVKGKHLCPSPLFPGPSKPFWVLVVVGGVLACYSLLVTVAFIIFWVRSKRSRLLHSDYMNMTPRRPGPTRKHYQPYAPPRDFAAYRSRVKFSRSADAPAYQQGQNQLYNELNLGRREEYDVLDKRRGRDPEMGGKPRRKNPQEGLYNELQKDKMAEAYSEIGMKGERRRGKGHDGLYQGLSTATKDTYDALHMQALPPR

SEQ ID NO: 207058 - protein, 485 aa, Artificial Sequence
  Description of Artificial Sequence: Synthetic Chimeric Antigen Receptor
MALPVTALLLPLALLLHAARPQVQLQQSGGGLVKPGASLKLSCVTSGFTFRKFGMSWVRQTSDKRLEWVASISTGGYNTYYSDNVKGRFTISRENAKNTLYLQMSSLKSEDTALYYCTRGYSSTSYAMDYWGQGTTVTVGGGGSGGGGSGGGGSDIELTQSPASLSVATGEKVTIRCMTSTDIDDDMNWYQQKPGEPPKFLISEGNTLRPGVPSRFSSSGTGTDFVFTIENTLSEDVGDYYCLQSFNVPLTFGDGTKLEKALTTTPAPRPPTPAPTIASQPLSLRPEACRPAAGGAVHTRGLDFACDIYIWAPLAGTCGVLLLSLVITLYCKRGRKKLLYIFKQPFMRPVQTTQEEDGCSCRFPEEEEGGCELRVKFSRSADAPAYQQGQNQLYNELNLGRREEYDVLDKRRGRDPEMGGKPRRKNPQEGLYNELQKDKMAEAYSEIGMKGERRRGKGHDGLYQGLSTATKDTYDALHMQALPPR

SEQ ID NO: 207059 - protein, 548 aa, Artificial Sequence
  Description of Artificial Sequence: Synthetic Chimeric Antigen Receptor
MVLLVTSLLLCELPHPAFLLIPDIQMTQSPSSLSASVGDRVTITCRASQGIRNNLAWYQQKPGKAPKRLIYAASNLQSGVPSRFTGSGSGTEFTLIVSSLQPEDFATYYCLQHHSYPLTSGGGTKVEIKRTGSTSGSGKPGSGEGSEVQVLESGGGLVQPGGSLRLSCAASGFTFSSYAMSWVRQAPGKGLEWVSAISGSGGSTNYADSVKGRFTISRDNSKNTLYLQMNSLRAEDTAVYYCAGSSGWSEYWGQGTLVTVSSAAAFVPVFLPAKPTTTPAPRPPTPAPTIASQPLSLRPEACRPAAGGAVHTRGLDFACDIYIWAPLAGTCGVLLLSLVITLYCNHRNRSKRSRLLHSDYMNMTPRRPGPTRKHYQPYAPPRDFAAYRSRFSVVKRGRKKLLYIFKQPFMRPVQTTQEEDGCSCRFPEEEEGGCELRVKFSRSADAPAYQQGQNQLYNELNLGRREEYDVLDKRRGRDPEMGGKPRRKNPQEGLYNELQKDKMAEAYSEIGMKGERRRGKGHDGLYQGLSTATKDTYDALHMQALPPR

SEQ ID NO: 207060 - protein, 567 aa, Artificial Sequence
  Description of Artificial Sequence: Synthetic Chimeric Antigen Receptor
MALPVTALLLPLALLLHAARPDIQMTQSPSSLSASVGDRVTITCRASQGIRNNLAWYQQKPGKAPKRLIYAASNLQSGVPSRFTGSGSGTEFTLIVSSLQPEDFATYYCLQHHSYPLTSGGGTKVEIKRTGSTSGSGKPGSGEGSEVQVLESGGGLVQPGGSLRLSCAASGFTFSSYAMSWVRQAPGKGLEWVSAISGSGGSTNYADSVKGRFTISRDNSKNTLYLQMNSLRAEDTAVYYCAGSSGWSEYWGQGTLVRVSSTTTPAPRPPTPAPTIASQPLSLRPEACRPAAGGAVHTRGLDFACDIYIWAPLAGTCGVLLLSLVITLYCKRGRKKLLGGGGSGGGGSSNSYDSSSIKVLKGLDAVRKRPGMYIGDTDDGTGLHHMVFEVVDNAIDEALAGHCKEIIVTIHADNSVSVQDDGRGIPTGIHPEEGVSAAEVIMTVLHAGGKFDDNSYKVSGGLHGVGVSVVNALSQKLELVIQREGKIHRQIYEHGVPQAPLAVTGETEKTGTMVRFWPSLETFTNVTEFEYEILAKRLRELSFLNSGVSIRLRDKRDGKEDHFHYEG

SEQ ID NO: 207061 - protein, 647 aa, Artificial Sequence
  Description of Artificial Sequence: Synthetic Chimeric Antigen Receptor
EVQVLESGGGLVQPGGSLRLSCAASGFTFSSYAMSWVRQAPGKGLEWVSAISGSGGSTNYADSVKGRFTISRDNSKNTLYLQMNSLRAEDTAVYYCAGSSGWSEYWGQGTLVTVSSGGGGSGGGGSGGGGSDIQMTQSPSSLSASVGDRVTITCRASQGIRNNLAWYQQKPGKAPKRLIYAASNLQSGVPSRFTGSGSGTEFTLIVSSLQPEDFATYYCLQHHSYPLTSGGGTKVEIKEPKSPDKTHTCPPCPAPPVAGPSVFLFPPKPKDTLMIARTPEVTCVVVDVSHEDPEVKFNWYVDGVEVHNAKTKPREEQYNSTYRVVSVLTVLHQDWLNGKEYKCKVSNKALPAPIEKTISKAKGQPREPQVYTLPPSRDELTKNQVSLTCLVKGFYPSDIAVEWESNGQPENNYKTTPPVLDSDGSFFLYSKLTVDKSRWQQGNVFSCSVMHEALHNHYTQKSLSLSPGKIYIWAPLAGTCGVLLLSLVITLYCKRGRKKLLYIFKQPFMRPVQTTQEEDGCSCRFPEEEEGGCELRVKFSRSADAPAYQQGQNQLYNELNLGRREEYDVLDKRRGRDPEMGGKPRRKNPQEGLYNELQKDKMAEAYSEIGMKGERRRGKGHDGLYQGLSTATKDTYDALHMQALPPR

SEQ ID NO: 207062 - protein, 650 aa, Artificial Sequence
  Description of Artificial Sequence: Synthetic Chimeric Antigen Receptor
QVQLQQSGGGLVKPGASLKLSCVTSGFTFRKFGMSWVRQTSDKRLEWVASISTGGYNTYYSDNVKGRFTISRENAKNTLYLQMSSLKSEDTALYYCTRGYSSTSYAMDYWGQGTTVTVGGGGSGGGGSGGGGSDIELTQSPASLSVATGEKVTIRCMTSTDIDDDMNWYQQKPGEPPKFLISEGNTLRPGVPSRFSSSGTGTDFVFTIENTLSEDVGDYYCLQSFNVPLTFGDGTKLEKALEPKSPDKTHTCPPCPAPPVAGPSVFLFPPKPKDTLMIARTPEVTCVVVDVSHEDPEVKFNWYVDGVEVHNAKTKPREEQYNSTYRVVSVLTVLHQDWLNGKEYKCKVSNKALPAPIEKTISKAKGQPREPQVYTLPPSRDELTKNQVSLTCLVKGFYPSDIAVEWESNGQPENNYKTTPPVLDSDGSFFLYSKLTVDKSRWQQGNVFSCSVMHEALHNHYTQKSLSLSPGKIYIWAPLAGTCGVLLLSLVITLYCKRGRKKLLYIFKQPFMRPVQTTQEEDGCSCRFPEEEEGGCELRVKFSRSADAPAYQQGQNQLYNELNLGRREEYDVLDKRRGRDPEMGGKPRRKNPQEGLYNELQKDKMAEAYSEIGMKGERRRGKGHDGLYQGLSTATKDTYDALHMQALPPR

SEQ ID NO: 207063 - protein, 672 aa, Artificial Sequence [sequence omitted]

SEQ ID NO: 207064 - protein, 675 aa, Artificial Sequence [sequence omitted]

SEQ ID NO: 207065 - protein, 692 aa, Artificial Sequence
  Description of Artificial Sequence: Synthetic Chimeric Antigen Receptor
MALPVTALLLPLALLLHAARPDIQMTQSPSSLSASVGDRVTITCRASQGIRNNLAWYQQKPGKAPKRLIYAASNLQSGVPSRFTGSGSGTEFTLIVSSLQPEDFATYYCLQHHSYPLTSGGGTKVEIKRTGSTSGSGKPGSGEGSEVQVLESGGGLVQPGGSLRLSCAASGFTFSSYAMSWVRQAPGKGLEWVSAISGSGGSTNYADSVKGRFTISRDNSKNTLYLQMNSLRAEDTAVYYCAGSSGWSEYWGQGTLVTVSSTTTPAPRPPTPAPTIASQPLSLRPEACRPAAGGAVHTRGLDFACDIYIWAPLAGTCGVLLLSLVITLYCKRGRKKLLGGGGSGGGGSAASDEVNLIESRTVVPLNTWVLISNFKVAYNILRRPDGTFNRHLAEYLDRKVTANANPVDGVFSFDVLIDRRINLLSRVYRPAYADQEQPPSILDLEKPVDGDIVPVILFFHGGSFAHSSANSAIYDTLCRRLVGLCKCVVVSVNYRRAPENPYPCAYDDGWIALNWVNSRSWLKSKKDSKVHIFLAGDSSGGNIAHNVALRAGESGIDVLGNILLNPMFGGNERTESEKSLDGKYFVTVRDRDWYWKAFLPEGEDREHPACNPFSPRGKSLEGVSFPKSLVVVAGLDLIRDWQLAYAEGLKKAGQEVKLMHLEKATVGFYLLPNNNHFHNVMDEISAFVNAEC

SEQ ID NO: 207066 - protein, 243 aa, Artificial Sequence; identical to SEQ ID NO: 205447
  Description of Artificial Sequence: Synthetic Chimeric Antigen Receptor

SEQ ID NO: 207067 - protein, 422 aa, Artificial Sequence
  Description of Artificial Sequence: Synthetic Chimeric Antigen Receptor
MALPVTALLLPLALLLHAARPEIQLQQSGAELVKPGASVKLSCTGSGFNIEDYYIHWVKQRTEQGLEWIGRIDPENDETKYGPIFQGRATITADTSSNTVYLQLSSLTSEDTAVYYCAFRGGVYWGPGTTLTVSSGGGGSGGGGSGGGGSHMDVVMTQSPLTLSVAIGQSASISCKSSQSLLDSDGKTYLNWLLQRPGQSPKRLISLVSKLDSGVPDRFTGSGSGTDFTLRISRVEAEDLGIYYCWQGTHFPGTFGGGTKLEIQTLYCKRGRKKLLYIFKQPFMRPVQTTQEEDGCSCRFPEEEEGGCELRVKFSRSADAPAYKQGQNQLYNELNLGRREEYDVLDKRRGRDPEMGGKPRRKNPQEGLYNELQKDKMAEAYSEIGMKGERRRGKGHDGLYQGLSTATKDTYDALHMQALPPR

SEQ ID NO: 207068 - protein, 490 aa, Artificial Sequence
  Description of Artificial Sequence: Synthetic Chimeric Antigen Receptor
MALPVTALLLPLALLLHAARPEIQLVQSSAEVKKPSATVKISCKSSSFNIEDYYIHWVQQAPGKGLEWMGRIDPENDETKYGPIFQGRVTITADTSTNTVYMELSSLRSEDTAVYYCAFRGGVYWGQGTTVTVSSGGGGSGGGGSGGGGSGGGGSDVVMTQSPLSLPVTLGQPASISCKSSQSLLDSDGKTYLNWLQQRPGQSPRRLISLVSKLDSGVPDRFSGSGSGTDFTLKISRVEAEDVGVYYCWQGTHFPGTFGGGTKVEIKTTTPAPRPPTPAPTIASQPLSLRPEACRPAAGGAVHTRGLDFACDIYIWAPLAGTCGVLLLSLVITLYCKRGRKKLLYIFKQPFMRPVQTTQEEDGCSCRFPEEEEGGCELRVKFSRSADAPAYKQGQNQLYNELNLGRREEYDVLDKRRGRDPEMGGKPRRKNPQEGLYNELQKDKMAEAYSEIGMKGERRRGKGHDGLYQGLSTATKDTYDALHMQALPPR

SEQ ID NO: 207069 - protein, 491 aa, Artificial Sequence
  Description of Artificial Sequence: Synthetic Chimeric Antigen Receptor
MALPVTALLLPLALLLHAARPDVVMTQSPLSLPVTLGQPASISCKSSCISLLDSDGKTYLNWLQQRPGQSPRRLISLVSKLDSGVPDRFSGSGSGTDFTLKISRVEAEDVGVYYCWQGTHFPGTFGGGTKVEIKGGGGSGGGGSGGGGSGGGGSEIQLVQSGAEVKKPGATVKISCKGSGFNIEDYYIHWVQQAPGKGLEWMGRIDPENDETKYGPIFQGRVTITADTSTNTVYMELSSLRSEDTAVYYCAFRGGVYWGQGTTVTVSSTTTPAPRPPTPAPTIASQPLSLRPEACRPAAGGAVHTRGLDFACDIYIWAPLAGTCGVLLLSLVITLYCKRGRKKLLYIFKQPFMRPVQTTQEEDGCSCRFPEEEEGGCELRVKFSRSADAPAYKQGQNQLYNELNLGRREEYDVLDKRRGRDPEMGGKPRRKNPQEGLYNELQKDKMAEAYSEIGMKGERRRGKGHDGLYQGLSTATKDTYDALHMQALPPR

SEQ ID NO: 207070 - protein, 240 aa, Artificial Sequence; identical to SEQ ID NO: 205399
  Description of Artificial Sequence: Synthetic Chimeric Antigen Receptor

SEQ ID NO: 207071 - protein, 1347 aa, Artificial Sequence
  Description of Artificial Sequence: Synthetic Chimeric Antigen Receptor
QVQLVESGPGVVQPGRSLRISCAVSGFSVTNYGVHWVRQPPGKGLEWLGVRWAGGITNYNSAFMSRLTISKDNSKNTVYLQMNSLRAEDTAMYYCASRGGHYGYALDYWGQGTLVTVSSASTKGPSVFPLAPSSKSTSGGTAALGCLVKDYFPEPVTVSWNSGALTSGVHTFPAVLQSSGLYSLSSVVTVPSSSLGTQTYICNVNHKPSNTKVDKRVEPKSCDKTHTCPPCPAPELLGGPSVFLFPPKPKDTLMISRTPEVTCVVVDVSHEDPEVKFNWYVDGVEVHNAKTKPREEQYNSTYRVVSVLTVLHQDWLNGKEYKCKVSNKALPAPIEKTISKAKGQPREPQVYTLPPSRDELTKNQVSLTCLVKGFYPSDIAVEWESNGQPENNYKTTPPVLDSDGSFFLYSKLTVDKSRWQQGNVFSCSVMHEALHNHYTQKSLSLSPGKGSTSGSGKPGSSEGSTKGEIVMTQTPATLSVSAGERVTITCKASQSVSNDVTWYQQKPGQAPRLLIYSASNRYSGVPARFSGSGYGTEFTFTISSVQSEDFAVYFCQQDYSSFGQGTKLEIKRTVAAPSVFIFPPSDEQLKSGTASVVCLLNNFYPREAKVQWKVDNALQSGNSQESVTEQDSKDSTYSLSSTLTLSKADYEKHKVYACEVTHQGLSSPVTKSFNRGECGSTSGSGKPGSSEGSTKGFWVLVVVGGVLACYSLLVTVAFIIFWVKRGRKKLLYIFKQPFMRPVQTTQEEDGCSCRFPEEEEGGCELQRRKYRSNKGESPVEPAEPCHYSCPREEEGSTIPIQEDYRKPEPACSPGSTSGSGKPGSSEGSTKGRVKFSRSADAPAYKQGQNQLYNELNLGRREEYDVLDKRRGRDPEMGGKPRRKNPQEGLYNELQKDKMAEAYSEIGMKGERRRGKGHDGLYQGLSTATKDTYDALHMQALPPRGSTSGSGKPGSSEGSTKGVGALESLRGNADLAYILSMEPCGHCLIINNVNFCRESGLRTRTGSNIDCEKLRRRFSSLHFMVEVKGDLTAKKMVLALLELAQQDHGALDCCVVVILSHGCQASHLQFPGAVYGTDGCPVSVEKIVNIFNGTSCPSLGGKPKLFFIQACGGEQKDHGFEVASTSPEDESPGSNPEPDATPFQEGLRTFDQLDAISSLPTPSDIFVSYSTFPGFVSWRDPKSGSWYVETLDDIFEQWAHSEDLQSLLLRVANAVSVKGIYKQMPGCFNFLRKKLFFKTSMGVQVETISPGDGRTFPKRGQTCVVHYTGMLEDGKKVDSSRDRNKPFKFMLGKQEVIRGWEEGVAQMSVGQRAKLTISPDYAYGATGHPGIIPPHATLVFDVELLKLE

SEQ ID NO: 207072 - protein, 484 aa, Artificial Sequence; identical to SEQ ID NO: 207039
  Description of Artificial Sequence: Synthetic polypeptide

SEQ ID NO: 207073 - protein, 504 aa, Artificial Sequence
  Description of Artificial Sequence: Synthetic Chimeric Antigen Receptor
MALPVTALLLPLALLLHAARPGSSRAAQPAMAQVQLQQSGAELVKPGASVKISCKASGYSFTGYFMNWVKQSHGKSLEWIGRIHPYDGDTFYNQNFKDKATLTVDKSSNTAHMELLSLTSEDFAVYYCTRYDGSRAMDYWGQGTTVTVSSGGGGSGGGGSGGGGSDIELTQSPASLAVSLGQRAIISCKASQSVSFAGTSLMHWYHQKPGQQPKLLIYRASNLEAGVPTRFSGSGSKTDFTLNIHPVEEEDAATYYCQQSREYPYTFGGGTKLEIKRAAASTTTPAPRPPTPAPTIASQPLSLRPEACRPAAGGAVHTRGLDFACDIYIWAPLAGTCGVLLLSLVITLYCKRGRKKLLYIFKQPFMRPVQTTQEEDGCSCRFPEEEEGGCELRVKFSRSADAPAYKQGQNQLYNELNLGRREEYDVLDKRRGRDPEMGGKPRRKNPQEGLYNELQKDKMAEAYSEIGMKGERRRGKGHDGLYQGLSTATKDTYDALHMQALPPR

SEQ ID NO: 207074 - protein, 491 aa, Artificial Sequence
  Description of Artificial Sequence: Synthetic Chimeric Antigen Receptor
MALPVTALLLPLALLLHAARPGSQLVESGGGLVQPGRSLRLSCTTSGFTFGDYAMIWARQAPGKGLEWVSSISSSSSYIYYADSVKGRFTISRDNAKNSLYLQMNSLRAEDTAVYYCARERYDFWSGMDVWGKGTTVTVSSGGGGSGGGGSGGSAQSALTQPASVSGSPGQSITISCTGTSSDVGSYNLVSWYQQHPGKAPKLMIYEGSKRPSGVSNRFSGSKSGNAASLTISGLQAEDEADYYCQSYDSSLSVVFGGGTKLTVLGASTTTPAPRPPTPAPTIASQPLSLRPEACRPAAGGAVHTRGLDFACDIYIWAPLAGTCGVLLLSLVITLYCKRGRKKLLYIFKQPFMRPVQTTQEEDGCSCRFPEEEEGGCELRVKFSRSADAPAYKQGQNQLYNELNLGRREEYDVLDKRRGRDPEMGGKPRRKNPQEGLYNELQKDKMAEAYSEIGMKGERRRGKGHDGLYQGLSTATKDTYDALHMQALPPR

SEQ ID NO: 207075 - protein, 450 aa, Artificial Sequence
  Description of Artificial Sequence: Synthetic Chimeric Antigen Receptor
MALPVTALLLPLALLLHAARPGSAEVQLVQSGAEVKKPGASVKVSCKASGYTFTSYAMHWVRQAPGQRLEWMGWINAGNGNTKYSQKFQGRVTITRDTSASTAYMELSSLRSEDTAVYYCARDISYGSFDYWGQGTLVTVSSGGGGSGGGGSGGGGSSSELTQDPAVSVALGQTVRITCQGDNLRSYYASWYRQKSGQAPVLVIYGKNNRPSGIPDRFSGSSSGNTASLTITAAQAEDEADYYCHSRKSRGNHLLFGGGTKLTVLGQASTTTPAPRPPTPAPTIASQPLSLRPEACRPAAGGAVHTRGLDFACDIYIWAPLAGTCGVLLLSLVITLYCRVKFSRSADAPAYQQGQNQLYNELNLGRREEYDVLDKRRGRDPEMGGKPRRKNPQEGLYNELQKDKMAEAYSEIGMKGERRRGKGHDGLYQGLSTATKDTYDALHMQALPPR

SEQ ID NO: 207076 - protein, 450 aa, Artificial Sequence
  Description of Artificial Sequence: Synthetic Chimeric Antigen Receptor
MALPVTALLLPLALLLHAARPGSAEVQLVQSGAEVKKPGASVKVSCKASGYTFTSYAMHWVRQAPGQRLEWMGWINAGNGNTKYSQKFQGRVTITRDTSASTAYMELSSLRSEDTAVYYCARDISYGSFDYWGQGTLVTVSSGGGGSGGGGSGGGGSSSELTQDPAVSVALGQTVRITCQGDSLRSNYANWYQQKPGQAPVLVIYGQNNRPSGIPDRFSGSSSGNTASLTITGAQAADEADYYCDSRVSTGNHVVFGGGTKLTVLGQASTTTPAPRPPTPAPTIASQPLSLRPEACRPAAGGAVHTRGLDFACDIYIWAPLAGTCGVLLLSLVITLYCRVKFSRSADAPAYQQGQNQLYNELNLGRREEYDVLDKRRGRDPEMGGKPRRKNPQEGLYNELQKDKMAEAYSEIGMKGERRRGKGHDGLYQGLSTATKDTYDALHMQALPPR

SEQ ID NO: 207077 - protein, 466 aa, Artificial Sequence
  Description of Artificial Sequence: Synthetic Chimeric Antigen Receptor
DAVVTQESALTSSPGETVTLTCRSSTGAVTISNVASWVQEKPDHLFTGLIGGTNNRAPGVPARFSGSLIGDKAALTITGAQTEDEAIYFCVLWYSDHWVFGGGTKLTVLGGGGGSGGGGSGGGGSGGGGSDVQLQESGPGLVAPSQSLSITCTVSGFLLTDVGVNWVRQSPGKGLEWLGVIWGDGITDYNSALKSRLSVTKDNSKSQVFLKMNSLQSGDSARVYCVTGLFDYWGQGTTLTVSSTTTPAPRPPTPAPTIASQPLSLRPEACRPAAGGAVHTRGLDFACDIYIWAPLAGTCGVLLLSLVITLVCKRGRKKLLYIFKQPFMRPVQTTQEEDGCSCRFPEEEEGGCELRVKFSRSADAPAYKQGQNQLYNELNLGRREEYDVLDKRRGRDPEMGGKPRRKNPQEGLYNELQKDKMAEAVSEIGMKGERRRGKGHDGLYQGLSTATKDTYDALHMQALPPR

SEQ ID NO: 207078 - protein, 492 aa, Artificial Sequence
  Description of Artificial Sequence: Synthetic Chimeric Antigen Receptor
MALPVTALLLPLALLLHAARPGSAEVQLVQSGAEVKKPGASVKVSCKASGYTFTSYAMHWVRQAPGQRLEWMGWINAGNGNTKYSQKFQGRVTITRDTSASTAYMELSSLRSEDTAVYYCARDISYGSFDYWGQGTLVTVSSGGGGSGGGGSGGGGSSSELTQDPAVSVALGQTVRITCQGDSLRSNYANWYQQKPGQAPVLVIYGQNNRPSGIPDRFSGSSSGNTASLTITGAQAADEADYYCDSRVSTGNHVVFGGGTKLTVLGQASTTTPAPRPPTPAPTIASQPLSLRPEACRPAAGGAVHTRGLDFACDIYIWAPLAGTCGVLLLSLVITLYCRVGRKKLLYIFKQPFMRPVQTTQEEDGCSCRFPEEEEGGCELRVKFSRSADAPAYQQGQNQLYNELNLGRREEYDVLDKRRGRDPEMGGKPRRKNPQEGLYNELQKDKMAEAYSEIGMKGERRRGKGHDGLYQGLSTATKDTYDALHMQALPPR

SEQ ID NO: 207079 - protein, 496 aa, Artificial Sequence
  Description of Artificial Sequence: Synthetic Chimeric Antigen Receptor
MALPVTALLLPLALLLHAARPGSAEVQLVQSGAEVKKPGASVKVSCKASGYTFTSYAMHWVRQAPGQRLEWMGWINAGNGNTKYSQKFQGRVTITRDTSASTAYMELSSLRSEDTAVYYCARDISYGSFDYWGQGTLVTVSSGGGGSGGGGSGGGGSSSELTQDPAVSVALGQTVRITCQGDNLRSYYASWYRQKSGQAPVLVIYGKNNRPSGIPDRFSGSSSGNTASLTITAAQAEDEADYYCHSRKSRGNHLLFGGGTKLTVLGQASTTTPAPRPPTPAPTIASQPLSLRPEACRPAAGGAVHTRGLDFACDFWVLVVVGGVLACYSLLVTVAFIIFWVRSKRSRLLHSDYMNMTPRRPGPTRKHYQPYAPPRDFAAYRSIDRVKFSRSADAPAYQQGQNQLYNELNLGRREEYDVLDKRRGRDPEMGGKPRRKNPQEGLYNELQKDKMAEAYSEIGMKGERRRGKGHDGLYQGLSTATKDTYDALHMQALPPR

SEQ ID NO: 207080 - protein, 496 aa, Artificial Sequence
  Description of Artificial Sequence: Synthetic Chimeric Antigen Receptor
MALPVTALLLPLALLLHAARPGSAEVQLVQSGAEVKKPGASVKVSCKASGYTFTSYAMHWVRQAPGQRLEWMGWINAGNGNTKYSQKFQGRVTITRDTSASTAYMELSSLRSEDTAVYYCARDISYGSFDYWGQGTLVTVSSGGGGSGGGGSGGGGSSSELTQDPAVSVALGQTVRITCQGDSLRSNYANWYQQKPGQAPVLVIYGQNNRPSGIPDRFSGSSSGNTASLTITGAQAADEADYYCDSRVSTGNHVVFGGGTKLTVLGQASTTTPAPRPPTPAPTIASQPLSLRPEACRPAAGGAVHTRGLDFACDFWVLVVVGGVLACYSLLVTVAFIIFWVRSKRSRLLHSDYMNMTPRRPGPTRKHYQPYAPPRDFAAYRSIDRVKFSRSADAPAYQQGQNQLYNELNLGRREEYDVLDKRRGRDPEMGGKPRRKNPQEGLYNELQKDKMAEAYSEIGMKGERRRGKGHDGLYQGLSTATKDTYDALHMQALPPR

SEQ ID NO: 207081 - protein, 498 aa, Artificial Sequence
  Description of Artificial Sequence: Synthetic Chimeric Antigen Receptor
MALPVTALLLPLALLLHAARPGSAEVQLVQSGAEVKKPGASVKVSCKASGYTFTSYAMHWVRQAPGQRLEWMGWINAGNGNTKYSQKFQGRVTITRDTSASTAYMELSSLRSEDTAVYYCARDISYGSFDYWGQGTLVTVSSGGGGSGGGGSGGGGSSSELTQDPAVSVALGQTVRITCQGDSLRSNYANWYQQKPGQAPVLVIYGQNNRPSGIPDRFSGSSSGNTASLTITGAQAADEADYYCDSRVSTGNHVVFGGGTKLTVLGQASTTTPAPRPPTPAPTIASQPLSLRPEACRPAAGGAVHTRGLDFACDIYIWAPLAGTCGVLLLSLVITLYCRVRKYRSNKGESPVEPAEPCRYSCPREEEGSTIPIQEDYRKPEPACSPRVKFSRSADAPAYQQGQNQLYNELNLGRREEYDVLDKRRGRDPEMGGKPRRKNPQEGLYNELQKDKMAEAYSEIGMKGERRRGKGHDGLYQGLSTATKDTYDALHMQALPPR

SEQ ID NO: 207082 - protein, 434 aa, Artificial Sequence
  Description of Artificial Sequence: Synthetic Chimeric Antigen Receptor
DAVVTQESALTSSPGETVTLTCRSSTGAVTISNVASWVQEKPDHLFTGLIGGTNNRAPGVPARFSGSLIGDKAALTITGAQTEDEAIYFCVLWYSDHWVFGGGTKLTVLGGGGGSGGGGSGGGGSGGGGSDVQLQESGPGLVAPSQSLSITCTVSGFLLTDVGVNWVRQSPGKGLEWLGVIWGDGITDYNSALKSRLSVTKDNSKSQVFLKMNSLQSGDSARYVCVTGLFDYWGQGTTLTVSSESKVGPPCPPCPDIYIWAPLAGTCGVLLLSLVITLVCKRGRKKLLYIFKQPFMRPVQTTQEEDGCSCRFPEEEEGGCELRVKFSRSADAPAYKQGQNQLYNELNLGRREEYDVLDKRRGRDPEMGGKPRRKNPQEGLYNELQKDKMAEAVSEIGMKGERRRGKGHDGLYQGLSTATKDTYDALHMQALPPR

SEQ ID NO: 207083 - protein, 719 aa, Artificial Sequence
  Description of Artificial Sequence: Synthetic Chimeric Antigen Receptor
METDTLLLWVLLLWVPGSTGQVQLKESGPVLVAPSQTLSITCTVSGFSLASYNIHWVRQPPGKGLEWLGVIWAGGSTNYNSALMSRLSISKDNSKSQVFLQMNSLQTDDTAMYYCAKRSDDYSWFAYWGQGTLVTVSASGGGGSGGGGSGGGGSENVLTQSPAIMSASPGEKVTMTCRASSSVSSSYLHWYQQKSGASPKVWIYSTSNLASGVPGRFSGSGSGTSYSLTISSVEAEDAATYYCQQYSGYPITFGAGTKVEVKRSDPAEPKSPDKTHTCPPCPAPELLGGPSVFLFPPKPKDTLMISRTPEVTCVVVDVSHEDPEVKFNWYVDGVEVHNAKTKPREEQYNSTYRVVSVLTVLHQDWLNGKEYKCKVSNKALPAPIEKTISKAKGQPREPQVYTLPPSRDELTKNQVSLTCLVKGFYPSDIAVEWESNGQPENNYKTTPPVLDSDGSFFLYSKLTVDKSRWQQGNVFSCSVMHEALHNHYTQKSLSLSPGKKDPKFWVLVVVGGVLACYSLLVTVAFIIFWVRSKRSRLLHSDYMNMTPRRPGPTRKHYQPYAPPRDFAAYRSRDQRLPPDAHKPPGGGSFRTPIQEEQADAHSTLAKIRVKFSRSADAPAYQQGQNQLYNELNLGRREEYDVLDKRRGRDPEMGGKPRRKNPQEGLYNELQKDKMAEAYSEIGMKGERRRGKGHDGLYQGLSTATKDTYDALHMQALPPR

SEQ ID NO: 207084 - protein, 157 aa, Artificial Sequence
  Description of Artificial Sequence: Synthetic Chimeric Antigen Receptor
MGTSLLCWMALCLLGADHADACPYSNPSLCSGGGGSELPTQGTFSNVSTNVSPAKPTTTACPYSNPSLCSGGGGSPAPRPPTPAPTIASQPLSLRPEACRPAAGGAVHTRGLDFACDIYIWAPLAGTCGVLLLSLVITLYCNHRNRRRVCKCPRPVV

SEQ ID NO: 207085 - protein, 402 aa, Artificial Sequence
  Description of Artificial Sequence: Synthetic Chimeric Antigen Receptor
MLEGVQVETISPGDGRTFPKRGQTCVVHYTGMLEDGKKVDSSRDRNKPFKFMLGKQEVIRGWEEGVAQMSVGQRAKLTISPDYAYGATGHPGIIPPHATLVFDVELLKLESGGGSGVDGFGDVGALESLRGNADLAYILSMEPCGHCLIINNVNFCRESGLRTRTGSNIDCEKLRRRFSSLHFMVEVKGDLTAKKMVLALLELAQQDHGALDCCVVVILSHGCQASHLQFPGAVYGTDGCPVSVEKIVNIFNGTSCPSLGGKPKLFFIQACGGEQKDHGFEVASTSPEDESPGSNPEPDATPFQEGLRTFDQLDAISSLPTPSDIFVSYSTFPGFVSWRDPKSGSWYVETLDDIFEQWAHSEDLQSLLLRVANAVSVKGIYKQMPGCFNFLRKKLFFKTSAS

SEQ ID NO: 207086 - protein, 422 aa, Artificial Sequence
  Description of Artificial Sequence: Synthetic Chimeric Antigen Receptor
DVVMTQSPLSLPVTPGEPASISCRSSQSLVHSNANTYLHWYLQKPGQSPQLLIYKVSNRFSGVPDRFSGSGSGTDFTLKISRVEAEDVGVYYCSQNTHVPPTFGQGTKLEIKRGGGGSGGGGSGGGGSQVQLVQSGAEVKKPGASVKVSCKASGYTFTDYEMHWVRQAPGQGLEWMGALDPKTGDTAYSQKFKGRVTLTADESTSTAYMELSSLRSEDTAVYYCTRFYSYTYWGQGTLVTVSSTTTPAPRPPTPAPTIASQPLSLRPEACRPAAGGAVHTRGLDFACDIYIWAPLAGTCGVLLLSLVITRVKFSRSADAPAYQQGQNQLYNELNLGRREEYDVLDKRRGRDPEMGGKPQRRKNPQEGLYNELQKDKMAEAYSEIGMKGERRRGKGHDGLYQGLSTATKDTYDALHMQALPPR

SEQ ID NO: 207087 - protein, 456 aa, Artificial Sequence
  Description of Artificial Sequence: Synthetic Chimeric Antigen Receptor
MALPVTALLLPLALLLHAARPDVQLVESGGGLVQPGGSRKLSCAASGFTFSNFGMHWVRQAPEKGLEWVAYISSGGSSINYADTVKGRFTISRDNPKNTLFLQMTSLRSEDTAIYYCTRGGTGTRSLYYFDYWGQGATLIVGGGGSGGGGSGGGGSDIQMTQITSSLSVSLGDRVIISCRASQDIGNFLNWYQQKPDGSLKLLIYYTSRLQSGVPSRFSGWGSGTDYSLTISNLEEEDIATFFCQQGKTLPYTFGGGTKLEIKGLAVSTISSFFPPGYQIYIWAPLAGTCGVLLLSLVITLYCKRGRKKLLYIFKQPFMRPVQTTQEEDGCSCRFPEEEEGGCELRVKFSRSADAPAYQQGQNQLYNELNLGRREEYDVLDKRRGRDPEMGGKPRRKNPQEGLYNELQKDKMAEAYSEIGMKGERRRGKGHDGLYQGLSTATKDTYDALHMQALPP

SEQ ID NO: 207088 - protein, 501 aa, Artificial Sequence
  Description of Artificial Sequence: Synthetic Chimeric Antigen Receptor
METDTLLLWVLLLWVPGSTGQVQLQESGPGLVKPSQTLSITCTVSGFSLASYNIHWVRQPPGKGLEWLGVIWAGGSTNYNSALMSRLTISKDNSKNQVFLKMSSLTAADTAVYYCAKRSDDYSWFAYWGQGTLVTVSSGGGGSGGGGSGGGGSENQMTQSPSSLSASVGDRVTMTCRASSSVSSSYLHWYQQKSGKAPKVWIYSTSNLASGVPSRFSGSGSGTDYTLTISSLQPEDFATYYCQQYSGYPITFGQGTKVEIKRSDPAEPKSPDKTHTCPPCPKDPKFWVLVVVGGVLACYSLLVTVAFIIFWVRSKRSRLLHSDYMNMTPRRPGPTRKHYQPYAPPRDFAAYRSRDQRLPPDAHKPPGGGSFRTPIQEEQADAHSTLAKIRVKFSRSADAPAYQQGQNQLYNELNLGRREEYDVLDKRRGRDPEMGGKPRRKNPQEGLYNELQKDKMAEAYSEIGMKGERRRGKGHDGLYQGLSTATKDTYDALHMQALPPR

SEQ ID NO: 207089 - protein, 527 aa, Artificial Sequence
  Description of Artificial Sequence: Synthetic Chimeric Antigen Receptor
METDTLLLWVLLLWVPGSTGQVQLQESGPGLVKPSQTLSITCTVSGFSLASYNIHWVRQPPGKGLEWLGVIWAGGSTNYNSALMSRLTISKDNSKNQVFLKMSSLTAADTAVYYCAKRSDDYSWFAYWGQGTLVTVSSGGGGSGGGGSGGGGSENQMTQSPSSLSASVGDRVTMTCRASSSVSSSYLHWYQQKSGKAPKVWIYSTSNLASGVPSRFSGSGSGTDYTLTISSLQPEDFATYYCQQYSGYPITFGQGTKVEIKRSDPTTTPAPRPPTPAPTIASQPLSLRPEACRPAAGGAVHTRGLDFACDIFWVLVVVGGVLACYSLLVTVAFIIFWVRSKRSRLLHSDYMNMTPRRPGPTRKHYQPYAPPRDFAAYRSRDQRLPPDAHKPPGGGSFRTPIQEEQADAHSTLAKIRVKFSRSADAPAYQQGQNQLYNELNLGRREEYDVLDKRRGRDPEMGGKPRRKNPQEGLYNELQKDKMAEAYSEIGMKGERRRGKGHDGLYQGLSTATKDTYDALHMQALPPR

SEQ ID NO: 207090 - protein, 642 aa, Artificial Sequence
  Description of Artificial Sequence: Synthetic Chimeric Antigen Receptor
METDTLLLWVLLLWVPGSTGQVQLQESGPGLVKPSQTLSITCTVSGFSLASYNIHWVRQPPGKGLEWLGVIWAGGSTNYNSALMSRLTISKDNSKNQVFLKMSSLTAADTAVYYCAKRSDDYSWFAYWGQGTLVTVSSGGGGSGGGGSGGGGSENQMTQSPSSLSASVGDRVTMTCRASSSVSSSYLHWYQQKSGKAPKVWIYSTSNLASGVPSRFSGSGSGTDYTLTISSLQPEDFATYYCQQYSGYPITFGQGTKVEIKRSDPAEPKSPDKTHTCPPCPAPPVAGPSVFLFPPKPKDTLMIARTPEVTCVVVDVSHEDPEVKFNWYVDGVEVHNAKTKPREEQYNSTYRVVSVLTVLHQDWLNGKEYKCKVSNKALPAPIEKTISKAKGQPREPQVYTLPPSRDELTKNQVSLTCLVKGFYPSDIAVEWESNGQPENNYKTTPPVLDSDGSFFLYSKLTVDKSRWQQGNVFSCSVMHEALHNHYTQKSLSLSPGKKDPKFWVLVVVGGVLACYSLLVTVAFIIFWVRSRVKFSRSADAPAYQQGQNQLYNELNLGRREEYDVLDKRRGRDPEMGGKPRRKNPQEGLYNELQKDKMAEAYSEIGMKGERRRGKGHDGLYQGLSTATKDTYDALHMQALPPR

SEQ ID NO: 207091 - protein, 681 aa, Artificial Sequence
  Description of Artificial Sequence: Synthetic Chimeric Antigen Receptor
METDTLLLWVLLLWVPGSTGQVQLQESGPGLVKPSQTLSITCTVSGFSLASYNIHWVRQPPGKGLEWLGVIWAGGSTNYNSALMSRLTISKDNSKNQVFLKMSSLTAADTAVYYCAKRSDDYSWFAYWGQGTLVTVSSGGGGSGGGGSGGGGSENQMTQSPSSLSASVGDRVTMTCRASSSVSSSYLHWYQQKSGKAPKVWIYSTSNLASGVPSRFSGSGSGTDYTLTISSLQPEDFATYYCQQYSGYPITFGQGTKVEIKRSDPAEPKSPDKTHTCPPCPAPPVAGPSVFLFPPKPKDTLMIARTPEVTCVVVDVSHEDPEVKFNWYVDGVEVHNAKTKPREEQYNSTYRVVSVLTVLHQDWLNGKEYKCKVSNKALPAPIEKTISKAKGQPREPQVYTLPPSRDELTKNQVSLTCLVKGFYPSDIAVEWESNGQPENNYKTTPPVLDSDGSFFLYSKLTVDKSRWQQGNVFSCSVMHEALHNHYTQKSLSLSPGKKDPKFWVLVVVGGVLACYSLLVTVAFIIFWVRSKRSRLLHSDYMNMTPRRPGPTRKHYQPYAPPRDFAAYRSRVKFSRSADAPAYQQGQNQLYNELNLGRREEYDVLDKRRGRDPEMGGKPRRKNPQEGLYNELQKDKMAEAYSEIGMKGERRRGKGHDGLYQGLSTATKDTYDALHMQALPPR

SEQ ID NO: 207092 - protein, 717 aa, Artificial Sequence
  Description of Artificial Sequence: Synthetic Chimeric Antigen Receptor
METDTLLLWVLLLWVPGSTGQVQLQESGPGLVKPSQTLSITCTVSGFSLASYNIHWVRQPPGKGLEWLGVIWAGGSTNYNSALMSRLTISKDNSKNQVFLKMSSLTAADTAVYYCAKRSDDYSWFAYWGQGTLVTVSSGGGGSGGGGSGGGGSENQMTQSPSSLSASVGDRVTMTCRASSSVSSSYLHWYQQKSGKAPKVWIYSTSNLASGVPSRFSGSGSGTDYTLTISSLQPEDFATYYCQQYSGYPITFGQGTKVEIKRSDPAEPKSPDKTHTCPPCPAPPVAGPSVFLFPPKPKDTLMIARTPEVTCVVVDVSHEDPEVKFNWYVDGVEVHNAKTKPREEQYNSTYRVVSVLTVLHQDWLNGKEYKCKVSNKALPAPIEKTISKAKGQPREPQVYTLPPSRDELTKNQVSLTCLVKGFYPSDIAVEWESNGQPENNYKTTPPVLDSDGSFFLYSKLTVDKSRWQQGNVFSCSVMHEALHNHYTQKSLSLSPGKKDPKFWVLVVVGGVLACYSLLVTVAFIIFWVRSKRSRLLHSDYMNMTPRRPGPTRKHYQPYAPPRDFAAYRSRDQRLPPDAHKPPGGGSFRTPIQEEQADAHSTLAKIRVKFSRSADAPAYQQGQNQLYNELNLGRREEYDVLDKRRGRDPEMGGKPRRKNPQEGLYNELQKDKMAEAYSEIGMKGERRRGKGHDGLYQGLSTATKDTYDALHMQALPPR

SEQ ID NO: 207093 - protein, 718 aa, Artificial Sequence
  Description of Artificial Sequence: Synthetic Chimeric Antigen Receptor
METDTLLLWVLLLWVPGSTGQVQLQESGPGLVKPSQTLSITCTVSGFSLASYNIHWVRQPPGKGLEWLGVIWAGGSTNYNSALMSRLTISKDNSKNQVFLKMSSLTAADTAVYYCAKRSDDYSWFAYWGQGTLVTVSSGGGGSGGGGSGGGGSENQMTQSPSSLSASVGDRVTMTCRASSSVSSSYLHWYQQKSGKAPKVWIYSTSNLASGVPSRFSGSGSGTDYTLTISSLQPEDFATYYCQQYSGYPITFGQGTKVEIKRSDPAEPKSPDKTHTCPPCPAPELLGGPSVFLFPPKPKDTLMISRTPEVTCVVVDVSHEDPEVKFNWYVDGVEVHNAKTKPREEQYNSTYRVVSVLTVLHQDWLNGKEYKCKVSNKALPAPIEKTISKAKGQPREPQVYTLPPSRDELTKNQVSLTCLVKGFYPSDIAVEWESNGQPENNYKTTPPVLDSDGSFFLYSKLTVDKSRWQQGNVFSCSVMHEALHNHYTQKSLSLSPGKKDPKFWVLVVVGGVLACYSLLVTVAFIIFWVRSKRSRLLHSDYMNMTPRRPGPTRKHYQPYAPPRDFAAYRSRDQRLPPDAHKPPGGGSFRTPIQEEQADAHSTLAKIRVKFSRSADAPAYQQGQNQLYNELNLGRREEYDVLDKRRGRDPEMGGKPRRKNPQEGLYNELQKDKMAEAYSEIGMKGERRRGKGHDGLYQGLSTATKDTYDALHMQALPPR

SEQ ID NO: 207094 - protein, 858 aa, Artificial Sequence
  Description of Artificial Sequence: Synthetic Chimeric Antigen Receptor
MGTSLLCWMALCLLGADHADACPYSNPSLCSGGGGSELPTQGTFSNVSTNVSPAKPTTTACPYSNPSLCSGGGGSPAPRPPTPAPTIASQPLSLRPEACRPAAGGAVHTRGLDFACDIYIWAPLAGTCGVLLLSLVITLYCNHRNRRRVCKCPRPVVRAEGRGSLLTCGDVEENPGPMETDTLLLWVLLLWVPGSTGQVQLQESGPGLVKPSQTLSITCTVSGFSLASYNIHWVRQPPGKGLEWLGVIWAGGSTNYNSALMSRLTISKDNSKNQVFLKMSSLTAADTAVYYCAKRSDDYSWFAYWGQGTLVTVSSGGGGSGGGGSGGGGSENQMTQSPSSLSASVGDRVTMTCRASSSVSSSYLHWYQQKSGKAPKVWIYSTSNLASGVPSRFSGSGSGTDYTLTISSLQPEDFATYYCQQYSGYPITFGQGTKVEIKRSDPAEPKSPDKTHTCPPCPAPPVAGPSVFLFPPKPKDTLMIARTPEVTCVVVDVSHEDPEVKFNWYVDGVEVHNAKTKPREEQYNSTYRVVSVLTVLHQDWLNGKEYKCKVSNKALPAPIEKTISKAKGQPREPQVYTLPPSRDELTKNQVSLTCLVKGFYPSDIAVEWESNGQPENNYKTTPPVLDSDGSFFLYSKLTVDKSRWQQGNVFSCSVMHEALHNHYTQKSLSLSPGKKDPKFWVLVVVGGVLACYSLLVTVAFIIFWVRSKRSRLLHSDYMNMTPRRPGPTRKHYQPYAPPRDFAAYRSRVKFSRSADAPAYQQGQNQLYNELNLGRREEYDVLDKRRGRDPEMGGKPRRKNPQEGLYNELQKDKMAEAYSEIGMKGERRRGKGHDGLYQGLSTATKDTYDALHMQALPPR

SEQ ID NO: 207095 - protein, 892 aa, Artificial Sequence
  Description of Artificial Sequence: Synthetic Chimeric Antigen Receptor
QVQLVESGPGVVQPGRSLRISCAVSGFSVTNYGVHWVRQPPGKGLEWLGVIWAGGITNYNSAFMSRLTISKDNSKNTVYLQMNSLRAEDTAMYYCASRGGHYGYALDYWGQGTLVTVSSGSTSGSGKPGSSEGSTKGEIVMTQTPATLSVSAGERVTITCKASQSVSNDVTWYQQKPGQAPRLLIYSASNRYSGVPARFSGSGYGTEFTFTISSVQSEDFAVYFCQQDYSSFGQGTKLEIKFWVLVVVGGVLACYSLLVTVAFIIFWVKRGRKKLLYIFKQPFMRPVQTTQEEDGCSCRFPEEEEGGCELQRRKYRSNKGESPVEPAEPCHYSCPREEEGSTIPIQEDYRKPEPACSPGSTSGSGKPGSSEGSTKGRVKFSRSADAPAYKQGQNQLYNELNLGRREEYDVLDKRRGRDPEMGGKPRRKNPQEGLYNELQKDKMAEAYSEIGMKGERRRGKGHDGLYQGLSTATKDTYDALHMQALPPRGSTSGSGKPGSSEGSTKGVGALESLRGNADLAYILSMEPCGHCLIINNVNFCRESGLRTRTGSNIDCEKLRRRFSSLHFMVEVKGDLTAKKMVLALLELAQQDHGALDCCVVVILSHGCQASHLQFPGAVYGTDGCPVSVEKIVNIFNGTSCPSLGGKPKLFFIQACGGEQKDHGFEVASTSPEDESPGSNPEPDATPFQEGLRTFDQLDAISSLPTPSDIFVSYSTFPGFVSWRDPKSGSWYVETLDDIFEQWAHSEDLQSLLLRVANAVSVKGIYKQMPGCFNFLRKKLFFKTSMGVQVETISPGDGRTFPKRGQTCVVHYTGMLEDGKKVDSSRDRNKPFKFMLGKQEVIRGWEEGVAQMSVGQRAKLTISPDYAYGATGHPGIIPPHATLVFDVELLKLE

SEQ ID NO: 207096 - protein, 895 aa, Artificial Sequence
  Description of Artificial Sequence: Synthetic Chimeric Antigen Receptor
EVQLVQSGAEVEKPGASVKISCKASGSSFTGYNMNWVRQNIGKSLEWIGAIDPYYGGTSYNQKFKGRATLTVDKSTSTAYMHLKSLRSEDTAVYYCVSGMEYWGQGTSVTVSSGSTSGSGKPGSSEGSTKGDVVMTQTPLSLPVTPGEPASISCRSSQSLVHRNGNTYLHWYLQKPGQSPKLLIHKVSNRFSGVPDRFSGSGSGTDFTLKISRVEAEDLGVYFCSQSTHVPPLTFGAGTKLELKFWVLVVVGGVLACYSLLVTVAFIIFWVKRGRKKLLYIFKQPFMRPVQTTQEEDGCSCRFPEEEEGGCELQRRKYRSNKGESPVEPAEPCHYSCPREEEGSTIPIQEDYRKPEPACSPGSTSGSGKPGSSEGSTKGRVKFSRSADAPAYKQGQNQLYNELNLGRREEYDVLDKRRGRDPEMGGKPRRKNPQEGLYNELQKDKMAEAYSEIGMKGERRRGKGHDGLYQGLSTATKDTYDALHMQALPPRGSTSGSGKPGSSEGSTKGVGALESLRGNADLAYILSMEPCGHCLIINNVNFCRESGLRTRTGSNIDCEKLRRRFSSLHFMVEVKGDLTAKKMVLALLELAQQDHGALDCCVVVILSHGCQASHLQFPGAVYGTDGCPVSVEKIVNIFNGTSCPSLGGKPKLFFIQACGGEQKDHGFEVASTSPEDESPGSNPEPDATPFQEGLRTFDQLDAISSLPTPSDIFVSYSTFPGFVSWRDPKSGSWYVETLDDIFEQWAHSEDLQSLLLRVANAVSVKGIYKQMPGCFNFLRKKLFFKTSMGVQVETISPGDGRTFPKRGQTCVVHYTGMLEDGKKVDSSRDRNKPFKFMLGKQEVIRGWEEGVAQMSVGQRAKLTISPDYAYGATGHPGIIPPHATLVFDVELLKLE

SEQ ID NO: 207097 - protein, 900 aa, Artificial Sequence
  Description of Artificial Sequence: Synthetic Chimeric Antigen Receptor
EVKLVESGGGLVLPGDSLRLSCATSEFTFTDYYMTWVRQPPRKALEWLGFIRNRANGYTTEYNPSVKGRFTISRDNSQSILYLQMNTLRTEDSATYYCARVSNWAFDYWGQGTTLTVSSGSTSGSGKPGSSEGSTKGDVVMTQTPLSLPVSLGDQASISCRSSQSLLKNNGNTFLHWYLQKSGQSPKLLIYKVSNRLSGVPDRFSGSGSGTYFTLKISRVEAEDLGVYFCSQSTHIPYTFGGGTKLEIKFWVLVVVGGVLACYSLLVTVAFIIFWVKRGRKKLLYIFKQPFMRPVQTTQEEDGCSCRFPEEEEGGCELQRRKYRSNKGESPVEPAEPCHYSCPREEEGSTIPIQEDYRKPEPACSPGSTSGSGKPGSSEGSTKGRVKFSRSADAPAYKQGQNQLYNELNLGRREEYDVLDKRRGRDPEMGGKPRRKNPQEGLYNELQKDKMAEAYSEIGMKGERRRGKGHDGLYQGLSTATKDTYDALHMQALPPRGSTSGSGKPGSSEGSTKGVGALESLRGNADLAYILSMEPCGHCLIINNVNFCRESGLRTRTGSNIDCEKLRRRFSSLHFMVEVKGDLTAKKMVLALLELAQQDHGALDCCVVVILSHGCQASHLQFPGAVYGTDGCPVSVEKIVNIFNGTSCPSLGGKPKLFFIQACGGEQKDHGFEVASTSPEDESPGSNPEPDATPFQEGLRTFDQLDAISSLPTPSDIFVSYSTFPGFVSWRDPKSGSWYVETLDDIFEQWAHSEDLQSLLLRVANAVSVKGIYKQMPGCFNFLRKKLFFKTSMGVQVETISPGDGRTFPKRGQTCVVHYTGMLEDGKKVDSSRDRNKPFKFMLGKQEVIRGWEEGVAQMSVGQRAKLTISPDYAYGATGHPGIIPPHATLVFDVELLKLE

SEQ ID NO: 207098 - protein, 1103 aa, Artificial Sequence
  Description of Artificial Sequence: Synthetic Chimeric Antigen Receptor
MLEGVQVETISPGDGRTFPKRGQTCVVHYTGMLEDGKKVDSSRDRNKPFKFMLGKQEVIRGWEEGVAQMSVGQRAKLTISPDYAYGATGHPGIIPPHATLVFDVELLKLESGGGSGVDGFGDVGALESLRGNADLAYILSMEPCGHCLIINNVNFCRESGLRTRTGSNIDCEKLRRRFSSLHFMVEVKGDLTAKKMVLALLELAQQDHGALDCCVVVILSHGCQASHLQFPGAVYGTDGCPVSVEKIVNIFNGTSCPSLGGKPKLFFIQACGGEQKDHGFEVASTSPEDESPGSNPEPDATPFQEGLRTFDQLDAISSLPTPSDIFVSYSTFPGFVSWRDPKSGSWYVETLDDIFEQWAHSEDLQSLLLRVANAVSVKGIYKQMPGCFNFLRKKLFFKTSASRAEGRGSLLTCGDVEENPGPMETDTLLLWVLLLWVPGSTGQVQLQESGPGLVKPSQTLSITCTVSGFSLASYNIHWVRQPPGKGLEWLGVIWAGGSTNYNSALMSRLTISKDNSKNQVFLKMSSLTAADTAVYYCAKRSDDYSWFAYWGQGTLVTVSSGGGGSGGGGSGGGGSENQMTQSPSSLSASVGDRVTMTCRASSSVSSSYLHWYQQKSGKAPKVWIYSTSNLASGVPSRFSGSGSGTDYTLTISSLQPEDFATYYCQQYSGYPITFGQGTKVEIKRSDPAEPKSPDKTHTCPPCPAPPVAGPSVFLFPPKPKDTLMIARTPEVTCVVVDVSHEDPEVKFNWYVDGVEVHNAKTKPREEQYNSTYRVVSVLTVLHQDWLNGKEYKCKVSNKALPAPIEKTISKAKGQPREPQVYTLPPSRDELTKNQVSLTCLVKGFYPSDIAVEWESNGQPENNYKTTPPVLDSDGSFFLYSKLTVDKSRWQQGNVFSCSVMHEALHNHYTQKSLSLSPGKKDPKFWVLVVVGGVLACYSLLVTVAFIIFWVRSKRSRLLHSDYMNMTPRRPGPTRKHYQPYAPPRDFAAYRSRVKFSRSADAPAYQQGQNQLYNELNLGRREEYDVLDKRRGRDPEMGGKPRRKNPQEGLYNELQKDKMAEAYSEIGMKGERRRGKGHDGLYQGLSTATKDTYDALHMQALPPR

SEQ ID NO: 207099 - protein, 454 aa, Artificial Sequence
  Description of Artificial Sequence: Synthetic Chimeric Antigen Receptor
MALPVTALLLPLALLLHAARPQVQLQQSGGGLVKPGGSLTLSCAASRFTFSTYAMSWVRQTPAKRLEWVAYISSGGASTYYRDSVKGRFTISRDNAKNTLYLQMSSLRSEDTAMYYCARGGSRYAMDYWGQGTTVTVSSGGGGSGGGGSGGGGSDIQLTQSPAILSVSPGERVSFSCWASQSIGTSIHWYQQRTNGSPRLLIKYSSESISGIPSRFSGSGSGTDFTLSINSLESEDIADYYCQQTYSWPFTFGSGTKLEIGLAVSTISSFFPPGYQIYIWAPLAGTCGVLLLSLVITLYCKRGRKKLLYIFKQPFMRPVQTTQEEDGCSCRFPEEEEGGCELRVKFSRSADAPAYQQGQNQLYNELNLGRREEYDVLDKRRGRDPEMGGKPRRKNPQEGLYNELQKDKMAEAYSEIGMKGERRRGKGHDGLYQGLSTATKDTYDALHMQALPPR

SEQ ID NO: 207100 - protein, 456 aa, Artificial Sequence
  Description of Artificial Sequence: Synthetic Chimeric Antigen Receptor
MALPVTALLLPLALLLHAARPEVTLVESGGDFVKPGGSLKVSCAASGFAFSHYAMSWVRQTPAKRLEWVAYISSGGSGTYYSDSVKGRFTISRDNAKNTLYLQMRSLRSEDSAMYFCTRVKLGTYYFDSWGQGTTLTVSSGGGGSGGGGSGGGGSDIQMTQTASSLPASLGDRVTISCSASQDISNYLNWYQQKPDGTVKLLIFYSSNLHSGVPSRFSGGGSGTDYSLTISNLEPEDIATYFCHQYSKLPWTFGGGTKLEIKGLAVSTISSFFPPGYQIYIWAPLAGTCGVLLLSLVITLYCKRGRKKLLYIFKQPFMRPVQTTQEEDGCSCRFPEEEEGGCELRVKFSRSADAPAYQQGQNQLYNELNLGRREEYDVLDKRRGRDPEMGGKPRRKNPQEGLYNELQKDKMAEAYSEIGMKGERRRGKGHDGLYQGLSTATKDTYDALHMQALPPR

SEQ ID NO: 207101 - protein, 459 aa, Artificial Sequence
  Description of Artificial Sequence: Synthetic Chimeric Antigen Receptor
MALPVTALLLPLALLLHAARPEVVVVESGGGFVKPGGSLKLSCAAAGFTFSRYAMSWVRQTPEKRLEWVATISSGGSHTYYPDSVKGRFTISRDNAKNTLYLQMSSLRSEDTAIYYCARPGYDRGAWFFDVWGAGTTVTVSSGGGGSGGGGSGGGGSDIVLTQSPATLSVTPGDSVSLSCRASQIISNNLHWYQQKSHESPRLLIKYASQSISGIPSRFSGSGSGTDFTLSINSVETEDFGMYFCQQSNSWPLTFGSGTKLEIKRGLAVSTISSFFPPGYQIYIWAPLAGTCGVLLLSLVITLYCKRGRKKLLYIFKQPFMRPVQTTQEEDGCSCRFPEEEEGGCELRVKFSRSADAPAYQQGQNQLYNELNLGRREEYDVLDKRRGRDPEMGGKPRRKNPQEGLYNELQKDKMAEAYSEIGMKGERRRGKGHDGLYQGLSTATKDTYDALHMQALPPR

SEQ ID NO: 207102 - protein, 483 aa, Artificial Sequence
  Description of Artificial Sequence: Synthetic Chimeric Antigen Receptor
MALPVTALLLPLALLLHAARPQVQLQQSGGGLVKPGGSLTLSCAASRFTFSTYAMSWVRQTPAKRLEWVAYISSGGASTYYRDSVKGRFTISRDNAKNTLYLQMSSLRSEDTAMYYCARGGSRYAMDYWGQGTTVTVSSGGGGSGGGGSGGGGSDIQLTQSPAILSVSPGERVSFSCWASQSIGTSIHWYQQRTNGSPRLLIKYSSESISGIPSRFSGSGSGTDFTLSINSLESEDIADYYCQQTYSWPFTFGSGTKLEITTTPAPRPPTPAPTIASQPLSLRPEACRPAAGGAVHTRGLDFACDIYIWAPLAGTCGVLLLSLVITLYCKRGRKKLLYIFKQPFMRPVQTTQEEDGCSCRFPEEEEGGCELRVKFSRSADAPAYQQGQNQLYNELNLGRREEYDVLDKRRGRDPEMGGKPRRKNPQEGLYNELQKDKMAEAYSEIGMKGERRRGKGHDGLYQGLSTATKDTYDALHMQALPPR

SEQ ID NO: 207103 - protein, 485 aa, Artificial Sequence
  Description of Artificial Sequence: Synthetic Chimeric Antigen Receptor
MALPVTALLLPLALLLHAARPEVTLVESGGDFVKPGGSLKVSCAASGFAFSHYAMSWVRQTPAKRLEWVAYISSGGSGTYYSDSVKGRFTISRDNAKNTLYLQMRSLRSEDSAMYFCTRVKLGTYYFDSWGQGTTLTVSSGGGGSGGGGSGGGGSDIQMTQTASSLPASLGDRVTISCSASQDISNYLNWYQQKPDGTVKLLIFYSSNLHSGVPSRFSGGGSGTDYSLTISNLEPEDIATYFCHQYSKLPWTFGGGTKLEIKTTTPAPRPPTPAPTIASQPLSLRPEACRPAAGGAVHTRGLDFACDIYIWAPLAGTCGVLLLSLVITLYCKRGRKKLLYIFKQPFMRPVQTTQEEDGCSCRFPEEEEGGCELRVKFSRSADAPAYQQGQNQLYNELNLGRREEYDVLDKRRGRDPEMGGKPRRKNPQEGLYNELQKDKMAEAYSEIGMKGERRRGKGHDGLYQGLSTATKDTYDALHMQALPPR

SEQ ID NO: 207104 - protein, 486 aa, Artificial Sequence
  Description of Artificial Sequence: Synthetic Chimeric Antigen Receptor
MALPVTALLLPLALLLHAARPDVQLVESGGGLVQPGGSRKLSCAASGFTFSNFGMHWVRQAPEKGLEWVAYISSGGSSINYADTVKGRFTISRDNPKNTLFLQMTSLRSEDTAIYYCTRGGTGTRSLYYFDYWGQGATLIVGGGGSGGGGSGGGGSDIQMTQITSSLSVSLGDRVIISCRASQDIGNFLNWYQQKPDGSLKLLIYYTSRLQSGVPSRFSGWGSGTDYSLTISNLEEEDIATFFCQQGKTLPYTFGGGTKLEIKTTTPAPRPPTPAPTIASQPLSLRPEACRPAAGGAVHTRGLDFACDIYIWAPLAGTCGVLLLSLVITLYCKRGRKKLLYIFKQPFMRPVQTTQEEDGCSCRFPEEEEGGCELRVKFSRSADAPAYQQGQNQLYNELNLGRREEYDVLDKRRGRDPEMGGKPRRKNPQEGLYNELQKDKMAEAYSEIGMKGERRRGKGHDGLYQGLSTATKDTYDALHMQALPPR

SEQ ID NO: 207105 - protein, 488 aa, Artificial Sequence
  Description of Artificial Sequence: Synthetic Chimeric Antigen Receptor
MALPVTALLLPLALLLHAARPEVVVVESGGGFVKPGGSLKLSCAAAGFTFSRYAMSWVRQTPEKRLEWVATISSGGSHTYYPDSVKGRFTISRDNAKNTLYLQMSSLRSEDTAIYYCARPGYDRGAWFFDVWGAGTTVTVSSGGGGSGGGGSGGGGSDIVLTQSPATLSVTPGDSVSLSCRASQIISNNLHWYQQKSHESPRLLIKYASQSISGIPSRFSGSGSGTDFTLSINSVETEDFGMYFCQQSNSWPLTFGSGTKLEIKRTTTPAPRPPTPAPTIASQPLSLRPEACRPAAGGAVHTRGLDFACDIYIWAPLAGTCGVLLLSLVITLYCKRGRKKLLYIFKQPFMRPVQTTQEEDGCSCRFPEEEEGGCELRVKFSRSADAPAYQQGQNQLYNELNLGRREEYDVLDKRRGRDPEMGGKPRRKNPQEGLYNELQKDKMAEAYSEIGMKGERRRGKGHDGLYQGLSTATKDTYDALHMQALPPR

SEQ ID NO: 207106 - protein, 669 aa, Artificial Sequence
  Description of Artificial Sequence: Synthetic Chimeric Antigen Receptor
MALPVTALLLPLALLLHAARPQVQLQQSGGGLVKPGGSLTLSCAASRFTFSTYAMSWVRQTPAKRLEWVAYISSGGASTYYRDSVKGRFTISRDNAKNTLYLQMSSLRSEDTAMYYCARGGSRYAMDYWGQGTTVTVSSGGGGSGGGGSGGGGSDIQLTQSPAILSVSPGERVSFSCWASQSIGTSIHWYQQRTNGSPRLLIKYSSESISGIPSRFSGSGSGTDFTLSINSLESEDIADYYCQQTYSWPFTFGSGTKLEIEPKSPDKTHTCPPCPAPPVAGPSVFLFPPKPKDTLMIARTPEVTCVVVDVSHEDPEVKFNWYVDGVEVHNAKTKPREEQYNSTYRVVSVLTVLHQDWLNGKEYKCKVSNKALPAPIEKTISKAKGQPREPQVYTLPPSRDELTKNQVSLTCLVKGFYPSDIAVEWESNGQPENNYKTTPPVLDSDGSFFLYSKLTVDKSRWQQGNVFSCSVMHEALHNHYTQKSLSLSPGKIYIWAPLAGTCGVLLLSLVITLYCKRGRKKLLYIFKQPFMRPVQTTQEEDGCSCRFPEEEEGGCELRVKFSRSADAPAYQQGQNQLYNELNLGRREEYDVLDKRRGRDPEMGGKPRRKNPQEGLYNELQKDKMAEAYSEIGMKGERRRGKGHDGLYQGLSTATKDTYDALHMQALPPR

SEQ ID NO: 207107 - protein, 671 aa, Artificial Sequence
  Description of Artificial Sequence: Synthetic Chimeric Antigen Receptor
MALPVTALLLPLALLLHAARPEVTLVESGGDFVKPGGSLKVSCAASGFAFSHYAMSWVRQTPAKRLEWVAYISSGGSGTYYSDSVKGRFTISRDNAKNTLYLQMRSLRSEDSAMYFCTRVKLGTYYFDSWGQGTTLTVSSGGGGSGGGGSGGGGSDIQMTQTASSLPASLGDRVTISCSASQDISNYLNWYQQKPDGTVKLLIFYSSNLHSGVPSRFSGGGSGTDYSLTISNLEPEDIATYFCHQYSKLPWTFGGGTKLEIKEPKSPDKTHTCPPCPAPPVAGPSVFLFPPKPKDTLMIARTPEVTCVVVDVSHEDPEVKFNWYVDGVEVHNAKTKPREEQYNSTYRVVSVLTVLHQDWLNGKEYKCKVSNKALPAPIEKTISKAKGQPREPQVYTLPPSRDELTKNQVSLTCLVKGFYPSDIAVEWESNGQPENNYKTTPPVLDSDGSFFLYSKLTVDKSRWQQGNVFSCSVMHEALHNHYTQKSLSLSPGKIYIWAPLAGTCGVLLLSLVITLYCKRGRKKLLYIFKQPFMRPVQTTQEEDGCSCRFPEEEEGGCELRVKFSRSADAPAYQQGQNQLYNELNLGRREEYDVLDKRRGRDPEMGGKPRRKNPQEGLYNELQKDKMAEAYSEIGMKGERRRGKGHDGLYQGLSTATKDTYDALHMQALPPR

SEQ ID NO: 207108 - protein, 672 aa, Artificial Sequence
  Description of Artificial Sequence: Synthetic Chimeric Antigen Receptor
MALPVTALLLPLALLLHAARPDVQLVESGGGLVQPGGSRKLSCAASGFTFSNFGMHWVRQAPEKGLEWVAYISSGGSSINYADTVKGRFTISRDNPKNTLFLQMTSLRSEDTAIYYCTRGGTGTRSLYYFDYWGQGATLIVGGGGSGGGGSGGGGSDIQMTQITSSLSVSLGDRVIISCRASQDIGNFLNWYQQKPDGSLKLLIYYTSRLQSGVPSRFSGWGSGTDYSLTISNLEEEDIATFFCQQGKTLPYTFGGGTKLEIKEPKSPDKTHTCPPCPAPPVAGPSVFLFPPKPKDTLMIARTPEVTCVVVDVSHEDPEVKFNWYVDGVEVHNAKTKPREEQYNSTYRVVSVLTVLHQDWLNGKEYKCKVSNKALPAPIEKTISKAKGQPREPQVYTLPPSRDELTKNQVSLTCLVKGFYPSDIAVEWESNGQPENNYKTTPPVLDSDGSFFLYSKLTVDKSRWQQGNVFSCSVMHEALHNHYTQKSLSLSPGKIYIWAPLAGTCGVLLLSLVITLYCKRGRKKLLYIFKQPFMRPVQTTQEEDGCSCRFPEEEEGGCELRVKFSRSADAPAYQQGQNQLYNELNLGRREEYDVLDKRRGRDPEMGGKPRRKNPQEGLYNELQKDKMAEAYSEIGMKGERRRGKGHDGLYQGLSTATKDTYDALHMQALPPR

SEQ ID NO: 207109 - protein, 674 aa, Artificial Sequence
  Description of Artificial Sequence: Synthetic Chimeric Antigen Receptor
MALPVTALLLPLALLLHAARPEVVVVESGGGFVKPGGSLKLSCAAAGFTFSRYAMSWVRQTPEKRLEWVATISSGGSHTYYPDSVKGRFTISRDNAKNTLYLQMSSLRSEDTAIYYCARPGYDRGAWFFDVWGAGTTVTVSSGGGGSGGGGSGGGGSDIVLTQSPATLSVTPGDSVSLSCRASQIISNNLHWYQQKSHESPRLLIKYASQSISGIPSRFSGSGSGTDFTLSINSVETEDFGMYFCQQSNSWPLTFGSGTKLEIKREPKSPDKTHTCPPCPAPPVAGPSVFLFPPKPKDTLMIARTPEVTCVVVDVSHEDPEVKFNWYVDGVEVHNAKTKPREEQYNSTYRVVSVLTVLHQDWLNGKEYKCKVSNKALPAPIEKTISKAKGQPREPQVYTLPPSRDELTKNQVSLTCLVKGFYPSDIAVEWESNGQPENNYKTTPPVLDSDGSFFLYSKLTVDKSRWQQGNVFSCSVMHEALHNHYTQKSLSLSPGKIYIWAPLAGTCGVLLLSLVITLYCKRGRKKLLYIFKQPFMRPVQTTQEEDGCSCRFPEEEEGGCELRVKFSRSADAPAYQQGQNQLYNELNLGRREEYDVLDKRRGRDPEMGGKPRRKNPQEGLYNELQKDKMAEAYSEIGMKGERRRGKGHDGLYQGLSTATKDTYDALHMQALPPR

SEQ ID NO: 207110 - protein, 415 aa, Artificial Sequence
  Description of Artificial Sequence: Synthetic Chimeric Antigen Receptor
MDWIWRILFLVGAATGAHSQVQLQQSGAELVRPGASVKLSCKASGYTFTDYEMHWVKQTPVHGLKWIGALDPKTGDTAYSQKFKGKATLTADKSSSTAYMELRSLTSEDSAVYYCTRFYSYTYWGQGTLVTVSAGGGGSGGGGSGGGGSDVVMTQTPLSLPVSLGDQASISCRSSQSLVHSNGNTYLHWYLQKPGQSPKLLIYKVSNRFSGVPDRFSGSGSGTDFTLKISRVEAEDLGVYFCSQNTHVPPTFGSGTKLEIKEPKSCDKTHTCPPCPDPKFWVLVVVGGVLACYSLLVTVAFIIRVKFSRSADAPAYQQGQNQLYNELNLGRREEYDVLDKRRGRDPEMGGKPRRKNPQEGLYNELQKDKMAEAYSEIGMKGERRRGKGHDGLYQGLSTATKDTYDALHMQALPPR

SEQ ID NO: 207111 - protein, 396 aa, Artificial Sequence
  Description of Artificial Sequence: Synthetic Chimeric Antigen Receptor
QVQLQQSGAELVRPGASVKLSCKASGYTFTDYEMHWVKQTPVHGLKWIGALDPKTGDTAYSQKFKGKATLTADKSSSTAYMELRSLTSEDSAVYYCTRFYSYTYWGQGTLVTVSAGGGGSGGGGSGGGGSDVVMTQTPLSLPVSLGDQASISCRSSQSLVHSNGNTYLHWYLQKPGQSPKLLIYKVSNRFSGVPDRFSGSGSGTDFTLKISRVEAEDLGVYFCSQNTHVPPTFGSGTKLEIKEPKSCDKTHTCPPCPDPKFWVLVVVGGVLACYSLLVTVAFIIRVKFSRSADAPAYQQGQNQLYNELNLGRREEYDVLDKRRGRDPEMGGKPRRKNPQEGLYNELQKDKMAEAYSEIGMKGERRRGKGHDGLYQGLSTATKDTYDALHMQALPPR

SEQ ID NO: 207112 - protein, 438 aa, Artificial Sequence
  Description of Artificial Sequence: Synthetic Chimeric Antigen Receptor
QVQLQQSGAELVRPGASVKLSCKASGYTFTDYEMHWVKQTPVHGLKWIGALDPKTGDTAYSQKFKGKATLTADKSSSTAYMELRSLTSEDSAVYYCTRFYSYTYWGQGTLVTVSAGGGGSGGGGSGGGGSDVVMTQTPLSLPVSLGDQASISCRSSQSLVHSNGNTYLHWYLQKPGQSPKLLIYKVSNRFSGVPDRFSGSGSGTDFTLKISRVEAEDLGVYFCSQNTHVPPTFGSGTKLEIKEPKSCDKTHTCPPCPDPKFWVLVVVGGVLACYSLLVTVAFIIKRGRKKLLYIFKQPFMRPVQTTQEEDGCSCRFPEEEEGGCELRVKFSRSADAPAYQQGQNQLYNELNLGRREEYDVLDKRRGRDPEMGGKPRRKNPQEGLYNELQKDKMAEAYSEIGMKGERRRGKGHDGLYQGLSTATKDTYDALHMQALPPR

SEQ ID NO: 207113 - protein, 440 aa, Artificial Sequence
  Description of Artificial Sequence: Synthetic Chimeric Antigen Receptor
QVQLQQSGAELVRPGASVKLSCKASGYTFTDYEMHWVKQTPVHGLKWIGALDPKTGDTAYSQKFKGKATLTADKSSSTAYMELRSLTSEDSAVYYCTRFYSYTYWGQGTLVTVSAGGGGSGGGGSGGGGSDVVMTQTPLSLPVSLGDQASISCRSSQSLVHSNGNTYLHWYLQKPGQSPKLLIYKVSNRFSGVPDRFSGSGSGTDFTLKISRVEAEDLGVYFCSQNTHVPPTFGSGTKLEIKEPKSCDKTHTCPPCPDPKFWVLVVVGGVLACYSLLVTVAFIIFWVRSKRSRLLHSDYMNMTPRRPGPTRKHYQPYAPPRDFAAYRSRVKFSRSADAPAYQQGQNQLYNELNLGRREEYDVLDKRRGRDPEMGGKPRRKNPQEGLYNELQKDKMAEAYSEIGMKGERRRGKGHDGLYQGLSTATKDTYDALHMQALPPR

SEQ ID NO: 207114 - protein, 457 aa, Artificial Sequence
  Description of Artificial Sequence: Synthetic Chimeric Antigen Receptor
MDWIWRILFLVGAATGAHSQVQLQQSGAELVRPGASVKLSCKASGYTFTDYEMHWVKQTPVHGLKWIGALDPKTGDTAYSQKFKGKATLTADKSSSTAYMELRSLTSEDSAVYYCTRFYSYTYWGQGTLVTVSAGGGGSGGGGSGGGGSDVVMTQTPLSLPVSLGDQASISCRSSQSLVHSNGNTYLHWYLQKPGQSPKLLIYKVSNRFSGVPDRFSGSGSGTDFTLKISRVEAEDLGVYFCSQNTHVPPTFGSGTKLEIKEPKSCDKTHTCPPCPDPKFWVLVVVGGVLACYSLLVTVAFIIKRGRKKLLYIFKQPFMRPVQTTQEEDGCSCRFPEEEEGGCELRVKFSRSADAPAYQQGQNQLYNELNLGRREEYDVLDKRRGRDPEMGGKPRRKNPQEGLYNELQKDKMAEAYSEIGMKGERRRGKGHDGLYQGLSTATKDTYDALHMQALPPR

SEQ ID NO: 207115 - protein, 459 aa, Artificial Sequence
  Description of Artificial Sequence: Synthetic Chimeric Antigen Receptor
MDWIWRILFLVGAATGAHSQVQLQQSGAELVRPGASVKLSCKASGYTFTDYEMHWVKQTPVHGLKWIGALDPKTGDTAYSQKFKGKATLTADKSSSTAYMELRSLTSEDSAVYYCTRFYSYTYWGQGTLVTVSAGGGGSGGGGSGGGGSDVVMTQTPLSLPVSLGDQASISCRSSQSLVHSNGNTYLHWYLQKPGQSPKLLIYKVSNRFSGVPDRFSGSGSGTDFTLKISRVEAEDLGVYFCSQNTHVPPTFGSGTKLEIKEPKSCDKTHTCPPCPDPKFWVLVVVGGVLACYSLLVTVAFIIFWVRSKRSRLLHSDYMNMTPRRPGPTRKHYQPYAPPRDFAAYRSRVKFSRSADAPAYQQGQNQLYNELNLGRREEYDVLDKRRGRDPEMGGKPRRKNPQEGLYNELQKDKMAEAYSEIGMKGERRRGKGHDGLYQGLSTATKDTYDALHMQALPPR

SEQ ID NO: 207116 - protein, 482 aa, Artificial Sequence
  Description of Artificial Sequence: Synthetic Chimeric Antigen Receptor
QVQLQQSGAELVRPGASVKLSCKASGYTFTDYEMHWVKQTPVHGLKWIGALDPKTGDTAYSQKFKGKATLTADKSSSTAYMELRSLTSEDSAVYYCTRFYSYTYWGQGTLVTVSAGGGGSGGGGSGGGGSDVVMTQTPLSLPVSLGDQASISCRSSQSLVHSNGNTYLHWYLQKPGQSPKLLIYKVSNRFSGVPDRFSGSGSGTDFTLKISRVEAEDLGVYFCSQNTHVPPTFGSGTKLEIKEPKSCDKTHTCPPCPDPKFWVLVVVGGVLACYSLLVTVAFIIFWVRSKRSRLLHSDYMNMTPRRPGPTRKHYQPYAPPRDFAAYRSKRGRKKLLYIFKQPFMRPVQTTQEEDGCSCRFPEEEEGGCELRVKFSRSADAPAYQQGQNQLYNELNLGRREEYDVLDKRRGRDPEMGGKPRRKNPQEGLYNELQKDKMAEAYSEIGMKGERRRGKGHDGLYQGLSTATKDTYDALHMQALPPR

SEQ ID NO: 207117 - protein, 501 aa, Artificial Sequence
  Description of Artificial Sequence: Synthetic Chimeric Antigen Receptor
MDWIWRILFLVGAATGAHSQVQLQQSGAELVRPGASVKLSCKASGYTFTDYEMHWVKQTPVHGLKWIGALDPKTGDTAYSQKFKGKATLTADKSSSTAYMELRSLTSEDSAVYYCTRFYSYTYWGQGTLVTVSAGGGGSGGGGSGGGGSDVVMTQTPLSLPVSLGDQASISCRSSQSLVHSNGNTYLHWYLQKPGQSPKLLIYKVSNRFSGVPDRFSGSGSGTDFTLKISRVEAEDLGVYFCSQNTHVPPTFGSGTKLEIKEPKSCDKTHTCPPCPDPKFWVLVVVGGVLACYSLLVTVAFIIFWVRSKRSRLLHSDYMNMTPRRPGPTRKHYQPYAPPRDFAAYRSKRGRKKLLYIFKQPFMRPVQTTQEEDGCSCRFPEEEEGGCELRVKFSRSADAPAYQQGQNQLYNELNLGRREEYDVLDKRRGRDPEMGGKPRRKNPQEGLYNELQKDKMAEAYSEIGMKGERRRGKGHDGLYQGLSTATKDTYDALHMQALPPR

SEQ ID NO: 207118 - DNA, 1380 bp, Artificial Sequence
  Description of Artificial Sequence: Synthetic Chimeric Antigen Receptor
atggattggatttggcgcattctgtttctggtgggagccgcaaccggagcacatagtcaggtccagctgcagcagtcaggagccgaactggtgcggcccggcgcaagtgtcaaactgtcatgcaaggccagcgggtataccttcacagactacgagatgcactgggtgaaacagacccctgtgcacggcctgaagtggatcggcgctctggacccaaaaaccggggatacagcatattcccagaagtttaaaggaaaggccactctgaccgctgacaagagctcctctactgcctacatggagctgaggagcctgacatccgaagatagcgccgtgtactattgcacccgcttctactcctatacatactggggccaggggactctggtgaccgtctctgcaggaggaggaggctctggaggaggagggagtggaggcgggggaagcgacgtggtcatgacacagactccactgtccctgcccgtgagcctgggcgatcaggctagcatttcctgtcgaagttcacagagtctggtgcactcaaacggaaatacctatctgcattggtacctgcagaagccaggccagtctcccaaactgctgatctataaggtgagcaaccggttctccggggtccctgacagattttctggaagtggctcagggacagatttcactctgaaaattagcagagtggaggccgaagatctgggcgtctacttttgtagccagaatacccacgtcccaccaacattcggaagcggcactaaactggaaatcaaggagcccaaatcttgtgacaaaactcacacatgcccaccgtgcccggatccgaaagatcccaaattttgggtgctggtggtggttggtggagtcctggcttgctatagcttgctagtaacagtggcctttattattaaacggggcagaaagaaactcctgtatatattcaaacaaccatttatgagaccagtacaaactactcaagaggaagatggctgtagctgccgatttccagaagaagaagaaggaggatgtgaactgagagtgaagttcagcaggagcgcagacgcccccgcgtaccagcagggccagaaccagctctataacgagctcaatctaggacgaagagaggagtacgatgttttggacaagagacgtggccgggaccctgagatggggggaaagccgagaaggaagaaccctcaggaaggcctgtacaatgaactgcagaaagataagatggcggaggcctacagtgagattgggatgaaaggcgagcgccggaggggcaaggggcacgatggcctttaccagggtctcagtacagccaccaaggacacctacgacgcccttcacatgcaggccctgccccctcgc

SEQ ID NO: 207119 - protein, 464 aa, Artificial Sequence
  Description of Artificial Sequence: Synthetic Chimeric Antigen Receptor
DVVMTQSPLSLPVTPGEPASISCRSSQSLVHSNANTYLHWYLQKPGQSPQLLIYKVSNRFSGVPDRFSGSGSGTDFTLKISRVEAEDVGVYYCSQNTHVPPTFGQGTKLEIKRGGGGSGGGGSGGGGSQVQLVQSGAEVKKPGASVKVSCKASGYTFTDYEMHWVRQAPGQGLEWMGALDPKTGDTAYSQKFKGRVTLTADESTSTAYMELSSLRSEDTAVYYCTRFYSYTYWGQGTLVTVSSTTTPAPRPPTPAPTIASQPLSLRPEACRPAAGGAVHTRGLDFACDIYIWAPLAGTCGVLLLSLVITKRGRKKLLYIFKQPFMRPVQTTQEEDGCSCRFPEEEEGGCELRVKFSRSADAPAYQQGQNQLYNELNLGRREEYDVLDKRRGRDPEMGGKPQRRKNPQEGLYNELQKDKMAEAYSEIGMKGERRRGKGHDGLYQGLSTATKDTYDALHMQALPPR

SEQ ID NO: 207120 - protein, 469 aa, Artificial Sequence
  Description of Artificial Sequence: Synthetic Chimeric Antigen Receptor
DVVMTQSPLSLPVTPGEPASISCRSSQSLVHSNANTYLHWYLQKPGQSPQLLIYKVSNRFSGVPDRFSGSGSGTDFTLKISRVEAEDVGVYYCSQNTHVPPTFGQGTKLEIKRGGGGSGGGGSGGGGSQVQLVQSGAEVKKPGASVKVSCKASGYTFTDYEMHWVRQAPGQGLEWMGALDPKTGDTAYSQKFKGRVTLTADESTSTAYMELSSLRSEDTAVYYCTRFYSYTYWGQGTLVTVSSTTTPAPRPPTPAPTIASQPLSLRPEACRPAAGGAVHTRGLDFACDFWVLVVVGGVLACYSLLVTVAFIIFWVRSKRSRLLHSDYMNMTPRRPGPTRKHYQPYAPPRDFAAYRSRVKFSRSADAPAYQQGQNQLYNELNLGRREEYDVLDKRRGRDPEMGGKPQRRKNPQEGLYNELQKDKMAEAYSEIGMKGERRRGKGHDGLYQGLSTATKDTYDALHMQALPPR

SEQ ID NO: 207121 - protein, 500 aa, Artificial Sequence
  Description of Artificial Sequence: Synthetic Chimeric Antigen Receptor
DIQMTQSPSSLSASVGDRVTITCRASQNIATDVSTAVAWIQQKPGKAPKLLIYSASFLYSGVPSRFSGSGSGTDFTLTISSLQPEDFATYYCQQSEPEPYTFGQGTKVEIKRGSTSGSGKPGSGEGSTKGEVQLVESGGGLVQPGGSLRLSCAASGFTLSGDWVIHWVRQAPGKGLEWVGEISAAGGYTDYADSVKGRFTISADTSKNTAYLQMNSLRAEDTAVYYCARESRVSFEAAMDYWGQGTLVPSDIAVEWESNGQPENNYKTTPPVLDSDGSFFLYSRLTVDKSRWQEGNVFSCSVMHEALHNHYTQKSLSLSLGKWVLVVVGGVLACYSLLVTVAFIIKRGRKKLLYIFKQPFMRPVQTTQEEDGCSCRFPEEEEGGCELRVKFSRSADAPAYQQGQNQLYNELNLGRREEYDVLDKRRGRDPEMGGKPQRRKNPQEGLYNELQKDKMAEAYSEIGMKGERRRGKGHDGLYQGLSTATKDTYDALHMQALPPR

SEQ ID NO: 207122 - protein, 511 aa, Artificial Sequence
  Description of Artificial Sequence: Synthetic Chimeric Antigen Receptor
DVVMTQSPLSLPVTPGEPASISCRSSQSLVHSNANTYLHWYLQKPGQSPQLLIYKVSNRFSGVPDRFSGSGSGTDFTLKISRVEAEDVGVYYCSQNTHVPPTFGQGTKLEIKRGGGGSGGGGSGGGGSQVQLVQSGAEVKKPGASVKVSCKASGYTFTDYEMHWVRQAPGQGLEWMGALDPKTGDTAYSQKFKGRVTLTADESTSTAYMELSSLRSEDTAVYYCTRFYSYTYWGQGTLVTVSSTTTPAPRPPTPAPTIASQPLSLRPEACRPAAGGAVHTRGLDFACDFWVLVVVGGVLACYSLLVTVAFIIFWVRSKRSRLLHSDYMNMTPRRPGPTRKHYQPYAPPRDFAAYRSKRGRKKLLYIFKQPFMRPVQTTQEEDGCSCRFPEEEEGGCELRVKFSRSADAPAYQQGQNQLYNELNLGRREEYDVLDKRRGRDPEMGGKPQRRKNPQEGLYNELQKDKMAEAYSEIGMKGERRRGKGHDGLYQGLSTATKDTYDALHMQALPPR

SEQ ID NO: 207123 - protein, 503 aa, Artificial Sequence
  Description of Artificial Sequence: Synthetic Chimeric Antigen Receptor
DIQMTQSPSSLSASVGDRVTITCRASQNIATDVSTAVAWIQQKPGKAPKLLIYSASFLYSGVPSRFSGSGSGTDFTLTISSLQPEDFATYYCQQSEPEPYTFGQGTKVEIKRGSTSGSGKPGSGEGSTKGEVQLVESGGGLVQPGGSLRLSCAASGFTLSGDWVIHWVRQAPGKGLEWVGEISAAGGYTDYADSVKGRFTISADTSKNTAYLQMNSLRAEDTAVYYCARESRVSFEAAMDYWGQGTLVPSDIAVEWESNGQPENNYKTTPPVLDSDGSFFLYSRLTVDKSRWQEGNVFSCSVMHEALHNHYTQKSLSLSLGKFWVLVVVGGVLACYSLLVTVAFIIFWVRSKRSRLLHSDYMNMTPRRPGPTRKHYQPYAPPRDFAAYRSRVKFSRSADAPAYQQGQNQLYNELNLGRREEYDVLDKRRGRDPEMGGKPQRRKNPQEGLYNELQKDKMAEAYSEIGMKGERRRGKGHDGLYQGLSTATKDTYDALHMQALPPR

SEQ ID NO: 207124 - protein, 818 aa, Artificial Sequence
  Description of Artificial Sequence: Synthetic Chimeric Antigen Receptor
MLLLVTSLLLCELPHPAFLLIPEVQLVESGGGLVQPGGSLRLSCAASGFNIKDTYIHWVRQSPGKGLEWVARIYPTNGYTRYADSVKGRFTISADTSKNTAYLQMNSLRAEDTAIYYCSRWGGDGFYAMDYWGQGTLVTVSSASTKGPSVFPLAPSSKSTSGGTAALGCLVKDYFPEPVTVSWNSGALTSGVHTFPAVLQSSGLYSLSSVVTVPSSSLGTQTYICNVNHKPSNTKVDKKVEPKSCESKYGPPCPPCPGGGSSGGGSGGQPREPQVYTLPPSQEEMTKNQVSLTCLVKGFYPSDIAVEWESNGQPENNYKTTPPVLDSDGSFFLYSRLTVDKSRWQEGNVFSCSVMHEALHNHYTQKSLSLSLGKMFWVLVVVGGVLACYSLLVTVAFIIFWVRSKRSRGGHSDYMNMTPRRPGPTRKHYQPYAPPRDFAAYRSGGGRVKFSRSADAPAYQQGQNQLYNELNLGRREEYDVLDKRRGRDPEMGGKPRRKNPQEGLYNELQKDKMAEAYSEIGMKGERRRGKGHDGLYQGLSTATKDTYDALHMQALPPRLEGGGEGRGSLLTCGDVEENPGPRMLLLVTSLLLCELPHPAFLLIPDIQMTQSPILLSASVGDRVTITCRASQDVNTAVAWYQQRTNGSPRLLIYSASFLYSGVPSRFSGSRSGTDFTLTISSLQPEDEADYYCQQHYTTPPTFGAGTKVEIKRTVAAPSVFIFPPSDEQLKSGTASVVCLLNNFYPREAKVQWKVDNALQSGNSQESVTEQDSKDSTYSLSSTLTLSKADYEKHKVYACEVTHQGLSSPVTKSFNRGEC

SEQ ID NO: 207125 - protein, 438 aa, Artificial Sequence
  Description of Artificial Sequence: Synthetic Chimeric Antigen Receptor
DIQMTQSPSSLSASVGDRVTITCRASQDVNTAVAWYQQKPGKAPKLLIVSASFLVSGVPSRFSGSRSGTDFTLTISSLQPEDFATYVCQQHYTTPPTFGQGTKVEIKRTGGGGSGGGGSGGGGSEVQLVESGGGLVQPGGSLRLSCAASGFNIKDTYIHWVRQAPGKGLEWVARIYPTNGYTRYADSVKGRFTISADTSKNTAYLQMNSLRAEDTAVVYCSRWGGDGFYAMDYWGQGTLVTVSSAAAESKVGPPCPPCPDIYIWAPLAGTCGVLLLSLVITLVCKRGRKKLLYIFKQPFMRPVQTTQEEDGCSCRFPEEEEGGCELRVKFSRSADAPAYKQGQNQLYNELNLGRREEYDVLDKRRGRDPEMGGKPRRKNPQEGLYNELQKDKMAEAVSEIGMKGERRRGKGHDGLYQGLSTATKDTYDALHMQALPPR

SEQ ID NO: 207126 - protein, 438 aa, Artificial Sequence
  Description of Artificial Sequence: Synthetic Chimeric Antigen Receptor
DIQMTQSPSSLSASVGDRVTITCRASQDVNTAVAWYQQKPGKAPKLLIYSASFLYSGVPSRFSGSRSGTDFTLTISSLQPEDFATYYCQQHYTTPPTFGQGTKVEIKRTGGGGSGGGGSGGGGSEVQLVESGGGLVQPGGSLRLSCAASGFNIKDTYIHWVRQAPGKGLEWVARIYPTNGYTRYADSVKGRFTISADTSKNTAYLQMNSLRAEDTAVYYCSRWGGDGFYAMDYWGQGTLVTVSSAAAESKYGPPCPPCPDIYIWAPLAGTCGVLLLSLVITLYCKRGRKKLLYIFKQPFMRPVQTTQEEDGCSCRFPEEEEGGCELRVKFSRSADAPAYKQGQNQLYNELNLGRREEYDVLDKRRGRDPEMGGKPRRKNPQEGLYNELQKDKMAEAYSEIGMKGERRRGKGHDGLYQGLSTATKDTYDALHMQALPPR

SEQ ID NO: 207127 - protein, 470 aa, Artificial Sequence
  Description of Artificial Sequence: Synthetic Chimeric Antigen Receptor
DIQMTQSPSSLSASVGDRVTITCRASQDVNTAVAWYQQKPGKAPKLLIVSASFLVSGVPSRFSGSRSGTDFTLTISSLQPEDFATYVCQQHYTTPPTFGQGTKVEIKRTGGGGSGGGGSGGGGSEVQLVESGGGLVQPGGSLRLSCAASGFNIKDTYIHWVRQAPGKGLEWVARIYPTNGYTRYADSVKGRFTISADTSKNTAYLQMNSLRAEDTAVVYCSRWGGDGFYAMDYWGQGTLVTVSSAAATTTPAPRPPTPAPTIASQPLSLRPEACRPAAGGAVHTRGLDFACDIYIWAPLAGTCGVLLLSLVITLVCKRGRKKLLYIFKQPFMRPVQTIQEEDGCSCRFPEEEEGGCELRVKFSRSADAPAYKQGQNQLYNELNLGRREEYDVLDKRRGRDPEMGGKPRRKNPQEGLYNELQKDKMAEAVSEIGMKGERRRGKGHDGLYQGLSTATKDTYDALHMQALPPR

SEQ ID NO: 207128 - protein, 470 aa, Artificial Sequence
  Description of Artificial Sequence: Synthetic Chimeric Antigen Receptor
DIQMTQSPSSLSASVGDRVTITCRASQDVNTAVAWYQQKPGKAPKLLIYSASFLYSGVPSRFSGSRSGTDFTLTISSLQPEDFATYYCQQHYTTPPTFGQGTKVEIKRTGGGGSGGGGSGGGGSEVQLVESGGGLVQPGGSLRLSCAASGFNIKDTYIHWVRQAPGKGLEWVARIYPTNGYTRYADSVKGRFTISADTSKNTAYLQMNSLRAEDTAVYYCSRWGGDGFYAMDYWGQGTLVTVSSAAATTTPAPRPPTPAPTIASQPLSLRPEACRPAAGGAVHTRGLDFACDIYIWAPLAGTCGVLLLSLVITLYCKRGRKKLLYIFKQPFMRPVQTTQEEDGCSCRFPEEEEGGCELRVKFSRSADAPAYKQGQNQLYNELNLGRREEYDVLDKRRGRDPEMGGKPRRKNPQEGLYNELQKDKMAEAYSEIGMKGERRRGKGHDGLYQGLSTATKDTYDALHMQALPPR

SEQ ID NO: 207129 - protein, 680 aa, Artificial Sequence
  Description of Artificial Sequence: Synthetic Chimeric Antigen Receptor
MLLLVTSLLLCELPHPAFLLIPMAQVKLQQSGPDLVKPGASVKISCKASGYSFTGYYMHWVKQSHGKSLEWIGRVNPNSGGTSYNQKFKDKAILTVDKSSSTAYMELRSLTSEDSAVYYCARSKGNYFYAMDYWGQGTTVTVSSSGGGSGGGGSGGGGSDIELTQSPSSLAVSLGQRATISCRASESVDSHGTSLMHWYQQKPGQPPKFLIYRASNLESGIPARFSGSGSRTDFTLTINPVETDDVAIYYCQQSNEDPPTFGGGTKLELKESKYGPPCPPCPAPEFLGGPSVFLFPPKPKDTLMISRTPEVTCVVVDVSQEDPEVQFNWYVDGVEVHNAKTKPREEQFNSTYRVVSVLTVLHQDWLNGKEYKCKVSNKGLPSSIEKTISKAKGQPREPQVYTLPPSQEEMTKNQVSLTCLVKGFYPSDIAVEWESNGQPENNYKTTPPVLDSDGSFFLYSRLTVDKSRWQEGNVFSCSVMHEALHNHYTQKSLSLSLGKMFWVLVVVGGVLACYSLLVTVAFIIFWVRSKRSRGGHSDYMNMTPRRPGPTRKHYQPYAPPRDFAAYRSRVKFSRSADAPAYQQGQNQLYNELNLGRREEYDVLDKRRGRDPEMGGKPRRKNPQEGLYNELQKDKMAEAYSEIGMKGERRRGKGHDGLYQGLSTATKDTYDALHMQALPPR

SEQ ID NO: 207130 - protein, 816 aa, Artificial Sequence
  Description of Artificial Sequence: Synthetic Chimeric Antigen Receptor
MLLLVTSLLLCELPHPAFLLIPDIQMTQSPILLSASVGDRVTITCRASQDVNTAVAWYQQRTNGSPRLLIYSASFLYSGVPSRFSGSRSGTDFTLTISSLQPEDEADYYCQQHYTTPPTFGAGTKVEIKRTVAAPSVFIFPPSDEQLKSGTASVVCLLNNFYPREAKVQWKVDNALQSGNSQESVTEQDSKDSTYSLSSTLTLSKADYEKHKVYACEVTHQGLSSPVTKSFNRGECLEGGGEGRGSLLTCGDVEENPGMLLLVTSLLLCELPHPAFLLIPEVQLVESGGGLVQPGGSLRLSCAASGFNIKDTYIHWVRQSPGKGLEWVARIYPTNGYTRYADSVKGRFTISADTSKNTAYLQMNSLRAEDTAIYYCSRWGGDGFYAMDYWGQGTLVTVSSASTKGPSVFPLAPSSKSTSGGTAALGCLVKDYFPEPVTVSWNSGALTSGVHTFPAVLQSSGLYSLSSVVTVPSSSLGTQTYICNVNHKPSNTKVDKKVEPKSCESKYGPPCPPCPGGGSSGGGSGGQPREPQVYTLPPSQEEMTKNQVSLTCLVKGFYPSDIAVEWESNGQPENNYKTTPPVLDSDGSFFLYSRLTVDKSRWQEGNVFSCSVMHEALHNHYTQKSLSLSLGKMFWVLVVVGGVLACYSLLVTVAFIIFWVRSKRSRGGHSDYMNMTPRRPGPTRKHYQPYAPPRDFAAYRSGGGRVKFSRSADAPAYQQGQNQLYNELNLGRREEYDVLDKRRGRDPEMGGKPRRKNPQEGLYNELQKDKMAEAYSEIGMKGERRRGKGHDGLYQGLSTATKDTYDALHMQALPPR

SEQ ID NO: 207131 - protein, 1162 aa, Artificial Sequence
  Description of Artificial Sequence: Synthetic Chimeric Antigen Receptor
MLLLVTSLLLCELPHPAFLLIPEVQLVESGGGLVQPGGSLRLSCAASGFNIKDTYIHWVRQSPGKGLEWVARIYPTNGYTRYADSVKGRFTISADTSKNTAYLQMNSLRAEDTAIYYCSRWGGDGFYAMDYWGQGTLVTVSSASTKGPSVFPLAPSSKSTSGGTAALGCLVKDYFPEPVTVSWNSGALTSGVHTFPAVLQSSGLYSLSSVVTVPSSSLGTQTYICNVNHKPSNTKVDKKVEPKSCESKYGPPCPPCPGGGSSGGGSGGQPREPQVYTLPPSQEEMTKNQVSLTCLVKGFYPSDIAVEWESNGQPENNYKTTPPVLDSDGSFFLYSRLTVDKSRWQEGNVFSCSVMHEALHNHYTQKSLSLSLGKMFWVLVVVGGVLACYSLLVTVAFIIFWVRSKRSRGGHSDYMNMTPRRPGPTRKHYQPYAPPRDFAAYRSGGGRVKFSRSADAPAYQQGQNQLYNELNLGRREEYDVLDKRRGRDPEMGGKPRRKNPQEGLYNELQKDKMAEAYSEIGMKGERRRGKGHDGLYQGLSTATKDTYDALHMQALPPRLEGGGEGRGSLLTCGDVEENPGPRMPPPRLLFFLLFLTPMEVRPEEPLVVKVEEGDNAVLQCLKGTSDGPTQQLTWSRESPLKPFLKLSLGLPGLGIHMRPLAIWLFIFNVSQQMGGFYLCQPGPPSEKAWQPGWTVNVEGSGELFRWNVSDLGGLGCGLKNRSSEGPSSPSGKLMSPKLYVWAKDRPEIWEGEPPCVPPRDSLNQSLSQDLTMAPGSTLWLSCGVPPDSVSRGPLSWTHVHPKGPKSLLSLELKDDRPARDMWVMETGLLLPRATAQDAGKYYCHRGNLTMSFHLEITARPVLWHWLLRTGGWKVSAVTLAYLIFCLCSLVGILHLQRALVLRRKRGGSTSEGRGSLLTCGDVEENPGPMETDTLLLWVLLLWVPGSTGDIQMTQSPILLSASVGDRVTITCRASQDVNTAVAWYQQRTNGSPRLLIYSASFLYSGVPSRFSGSRSGTDFTLTISSLQPEDEADYYCQQHYTTPPTFGAGTKVEIKRTVAAPSVFIFPPSDEQLKSGTASVVCLLNNFYPREAKVQWKVDNALQSGNSQESVTEQDSKDSTYSLSSTLTLSKADYEKHKVYACEVTHQGLSSPVTKSFNRGEC

SEQ ID NO: 207132 - protein, 606 aa, Artificial Sequence
  Description of Artificial Sequence: Synthetic Chimeric Antigen Receptor
MHPLLNPLLLALGLMALLLTTVIALTCLGGFASPGPVPPSTALRELIEELVNITQNQKAPLCNGSMVWSINLTAGMYCAALESLINVSGCSAIEKTQRMLSGFCPHKVSAGQFSSLHVRDTKIEVAQFVKDLLLHLKKLFREGQFNPRKPTTTPAPRPPTPAPTIASQPLSLRPEACRPAAGGAVHTRGLDFAQLLCYLLDGILFIYGVILTALFLRVVTFWVRSKRSRLLHSDYMNMTPRRPGPTRKHYQPYAPPRDFAAYRSTRKFSRSADAPAYQQGQNQLYNELNLGRREEYDVLDKRRGRDPEMGGKPRRKNPQEGLYNELQKDKMAEAYSEIGMKGERRRGKGHDGLYQGLSTATKDTYDALHMQALPPRQPAAAEGRGSLLTCGDVEENPGPMDKDCEMKRTTLDSPLGKLELSGCEQGLHEIKLLGKGTSAADAVEVPAPAAVLGGPEPLMQCTAWLNAYFHQPEAIEEFPVPALHHPVFQQESFTRQVLWKLLKVVKFGEVISYQQLAALAGNPKAARAVGGAMRGNPVKILIPCHRVVCSSGAVGNYSGGLAVKEWLLAHEGHRLGKPGLGGSSGLAGAWLKGAGATSGSPPAGRN

SEQ ID NO: 207133 - protein, 330 aa, Artificial Sequence
  Description of Artificial Sequence: Synthetic Chimeric Antigen Receptor
MVRGVPFRHLLLVLQLALLPAATQGKKVVLGKKGDTVELTCTASQKKSIQFHWKNSNQIKILGNQGSFLTKGPSKLNDRADSRRSLWDQGNFPLIIKNLKIEDSDTYICEVEDQKEEVQLLVFGLTANSDTHLLQGQSLTLTLESPPGSSPSVQCRSPRGKNIQGGKTLSVSQLELQDSGTWTCTVLQNQKKVEFKIDIVVLAFQKASGGGGSKQVGNKFFLTNGEIMTFEKVKALCVKFQASVATPRNAAENGAIQNLIKEEAFLGITDEKTEGQFVDLTGNRLTYTNWNEGEPNNAGSDEDCVLLLKNGQWNDVPCSTSHLAVCEFPI

SEQ ID NO: 207134 - protein, 354 aa, Artificial Sequence
  Description of Artificial Sequence: Synthetic Chimeric Antigen Receptor
MVRGVPFRHLLLVLQLALLPAATQGKKVVLGKKGDTVELTCTASQKKSIQFHWKNSNQIKILGNQGSFLTKGPSKLNDRADSRRSLWDQGNFPLIIKNLKIEDSDTYICEVEDQKEEVQLLVFGLTANSDTHLLQGQSLTLTLESPPGSSPSVQCRSPRGKNIQGGKTLSVSQLELQDSGTWTCTVLQNQKKVEFKIDIVVLAFQKASGGGGSQNDILQVVSQGWKYFKGNFYYFSLIPKTWYSAEQFCVSRNSHLTSVTSESEQEFLYKTAGGLIYWIGLTKAGMEGDWSWVDDTPFNKVQSVRFWIPGEPNNAGNNEHCGNIKAPSLQAWNDAPCDKTFLFICKRPYVPSEP

SEQ ID NO: 207135 - protein, 362 aa, Artificial Sequence
  Description of Artificial Sequence: Synthetic Chimeric Antigen Receptor
MVRGVPFRHLLLVLQLALLPAATQGKKVVLGKKGDTVELTCTASQKKSIQFHWKNSNQIKILGNQGSFLTKGPSKLNDRADSRRSLWDQGNFPLIIKNLKIEDSDTYICEVEDQKEEVQLLVFGLTANSDTHLLQGQSLTLTLESPPGSSPSVQCRSPRGKNIQGGKTLSVSQLELQDSGTWTCTVLQNQKKVEFKIDIVVLAFQKASGGGGSIYQELTDLKTAFERLCRHCPKDWTFFQGNCYFMSNSQRNWHDSVTACQEVRAQLVVIKTAEEQNFLQLQTSRSNRFSWMGLSDLNQEGTWQWVDGSPLSPSFQRYWNSGEPNNSGNEDCAEFSGSGWNDNRCDVDNYWICKKPAACFRD

SEQ ID NO: 207136 - protein, 380 aa, Artificial Sequence [sequence omitted]

SEQ ID NO: 207137 - protein, 457 aa, Artificial Sequence
  Description of Artificial Sequence: Synthetic Chimeric Antigen Receptor
MALPVTALLLPLALLLHAARPEVKLQESGPGLVAPSQSLSFTCTVSGFSLSRNSVHWVRQPPGKGLEWLGMIWGGGSTDYNSALKSRLNISKDSSKSQVFLKMNSLQTDDTAMYFCARNGGYDVFHYWGQGTTVTVSSGGGGSGGGGSGGGGSQAVVTQESALTTSPGETVTLTCRSSTGAVTTSNYANWVQEKPDHLFTGLIGGTNNRAPGVPARFSGSLIGDKAALTITGAQTEDEAIYFCALWYSNHLVFGGGTKLTVLGGLAVSTISSFFPPGYQIYIWAPLAGTCGVLLLSLVITLYCKRGRKKLLYIFKQPFMRPVQTTQEEDGCSCRFPEEEEGGCELRVKFSRSADAPAYQQGQNQLYNELNLGRREEYDVLDKRRGRDPEMGGKPRRKNPQEGLYNELQKDKMAEAYSEIGMKGERRRGKGHDGLYQGLSTATKDTYDALHMQALPPR

SEQ ID NO: 207138 - protein, 180 aa, Artificial Sequence; identical to SEQ ID NO: 206096
  Description of Artificial Sequence: Synthetic Chimeric Antigen Receptor

SEQ ID NO: 207139 - protein, 457 aa, Artificial Sequence
  Description of Artificial Sequence: Synthetic Chimeric Antigen Receptor
MALPVTALLLPLALLLHAARPEVQLVESGGGLVQPGGSLRLSCAASGFSLSRNSVHWVRQAPGKGLEWLGMIWGGGSTDYNSALKSRFTISRDNSKNTLYLQMNSLRAEDTAVYYCARNGGYDVFHYWGQGTTVTVSSGGGGSGGGGSGGGGSQAVVTQEPSLTVSPGGTVTLTCRSSTGAVTTSNYANWVQQKPGQAPRGLIGGTNNRAPWTPARFSGSLLGGKAALTLSGVQPEDEAEYYCALWYSNHLVFGGGTKLTVLGGLAVSTISSFFPPGYQIYIWAPLAGTCGVLLLSLVITLYCKRGRKKLLYIFKQPFMRPVQTTQEEDGCSCRFPEEEEGGCELRVKFSRSADAPAYQQGQNQLYNELNLGRREEYDVLDKRRGRDPEMGGKPRRKNPQEGLYNELQKDKMAEAYSEIGMKGERRRGKGHDGLYQGLSTATKDTYDALHMQALPPR

SEQ ID NO: 207140 - protein, 460 aa, Artificial Sequence
  Description of Artificial Sequence: Synthetic Chimeric Antigen Receptor
MALPVTALLLPLALLLHAARPEVKLQESGPGLVAPSQSLSFTCTVSGFSLSRNSVHWVRQPPGKGLEWLGMIWGGGSTDYNSALKSRLNISKDSSKSQVFLKMNSLQTDDTAMYFCARNGGYDVFHYWGQGTTVTVSSGGGGSGGGGSGGGGSQAVVTQESALTTSPGETVTLTCRSSTGAVTTSNYANWVQEKPDHLFTGLIGGTNNRAPGVPARFSGSLIGDKAALTITGAQTEDEAIYFCALWYSNHLVFGGGTKLTVLGGLAVSTISSFFPPGYQIISFFLALTSTALLFLLFFLTLRFSVVKRGRKKLLYIFKQPFMRPVQTTQEEDGCSCRFPEEEEGGCELRVKFSRSADAPAYQQGQNQLYNELNLGRREEYDVLDKRRGRDPEMGGKPRRKNPQEGLYNELQKDKMAEAYSEIGMKGERRRGKGHDGLYQGLSTATKDTYDALHMQALPPR

SEQ ID NO: 207141 - protein, 460 aa, Artificial Sequence
  Description of Artificial Sequence: Synthetic Chimeric Antigen Receptor
MALPVTALLLPLALLLHAARPEVQLVESGGGLVQPGGSLRLSCAASGFSLSRNSVHWVRQAPGKGLEWLGMIWGGGSTDYNSALKSRFTISRDNSKNTLYLQMNSLRAEDTAVYYCARNGGYDVFHYWGQGTTVTVSSGGGGSGGGGSGGGGSQAVVTQEPSLTVSPGGTVTLTCRSSTGAVTTSNYANWVQQKPGQAPRGLIGGTNNRAPWTPARFSGSLLGGKAALTLSGVQPEDEAEYYCALWYSNHLVFGGGTKLTVLGGLAVSTISSFFPPGYQIISFFLALTSTALLFLLFFLTLRFSVVKRGRKKLLYIFKQPFMRPVQTTQEEDGCSCRFPEEEEGGCELRVKFSRSADAPAYQQGQNQLYNELNLGRREEYDVLDKRRGRDPEMGGKPRRKNPQEGLYNELQKDKMAEAYSEIGMKGERRRGKGHDGLYQGLSTATKDTYDALHMQALPPR

SEQ ID NO: 207142 - protein, 486 aa, Artificial Sequence
  Description of Artificial Sequence: Synthetic Chimeric Antigen Receptor
MALPVTALLLPLALLLHAARPEVKLQESGPGLVAPSQSLSFTCTVSGFSLSRNSVHWVRQPPGKGLEWLGMIWGGGSTDYNSALKSRLNISKDSSKSQVFLKMNSLQTDDTAMYFCARNGGYDVFHYWGQGTTVTVSSGGGGSGGGGSGGGGSQAVVTQESALTTSPGETVTLTCRSSTGAVTTSNYANWVQEKPDHLFTGLIGGTNNRAPGVPARFSGSLIGDKAALTITGAQTEDEAIYFCALWYSNHLVFGGGTKLTVLGTTTPAPRPPTPAPTIASQPLSLRPEACRPAAGGAVHTRGLDFACDIYIWAPLAGTCGVLLLSLVITLYCKRGRKKLLYIFKQPFMRPVQTTQEEDGCSCRFPEEEEGGCELRVKFSRSADAPAYQQGQNQLYNELNLGRREEYDVLDKRRGRDPEMGGKPRRKNPQEGLYNELQKDKMAEAYSEIGMKGERRRGKGHDGLYQGLSTATKDTYDALHMQALPPR

SEQ ID NO: 207143 - protein, 486 aa, Artificial Sequence
  Description of Artificial Sequence: Synthetic Chimeric Antigen Receptor
MALPVTALLLPLALLLHAARPEVQLVESGGGLVQPGGSLRLSCAASGFSLSRNSVHWVRQAPGKGLEWLGMIWGGGSTDYNSALKSRFTISRDNSKNTLYLQMNSLRAEDTAVYYCARNGGYDVFHYWGQGTTVTVSSGGGGSGGGGSGGGGSQAVVTQEPSLTVSPGGTVTLTCRSSTGAVTTSNYANWVQQKPGQAPRGLIGGTNNRAPWTPARFSGSLLGGKAALTLSGVQPEDEAEYYCALWYSNHLVFGGGTKLTVLGTTTPAPRPPTPAPTIASQPLSLRPEACRPAAGGAVHTRGLDFACDIYIWAPLAGTCGVLLLSLVITLYCKRGRKKLLYIFKQPFMRPVQTTQEEDGCSCRFPEEEEGGCELRVKFSRSADAPAYQQGQNQLYNELNLGRREEYDVLDKRRGRDPEMGGKPRRKNPQEGLYNELQKDKMAEAYSEIGMKGERRRGKGHDGLYQGLSTATKDTYDALHMQALPPR

SEQ ID NO: 207144 - protein, 489 aa, Artificial Sequence
  Description of Artificial Sequence: Synthetic Chimeric Antigen Receptor
MALPVTALLLPLALLLHAARPEVKLQESGPGLVAPSQSLSFTCTVSGFSLSRNSVHWVRQPPGKGLEWLGMIWGGGSTDYNSALKSRLNISKDSSKSQVFLKMNSLQTDDTAMYFCARNGGYDVFHYWGQGTTVTVSSGGGGSGGGGSGGGGSQAVVTQESALTTSPGETVTLTCRSSTGAVTTSNYANWVQEKPDHLFTGLIGGTNNRAPGVPARFSGSLIGDKAALTITGAQTEDEAIYFCALWYSNHLVFGGGTKLTVLGTTTPAPRPPTPAPTIASQPLSLRPEACRPAAGGAVHTRGLDFACDIISFFLALTSTALLFLLFFLTLRFSVVKRGRKKLLYIFKQPFMRPVQTTQEEDGCSCRFPEEEEGGCELRVKFSRSADAPAYQQGQNQLYNELNLGRREEYDVLDKRRGRDPEMGGKPRRKNPQEGLYNELQKDKMAEAYSEIGMKGERRRGKGHDGLYQGLSTATKDTYDALHMQALPPR

SEQ ID NO: 207145 - protein, 489 aa, Artificial Sequence
  Description of Artificial Sequence: Synthetic Chimeric Antigen Receptor
MALPVTALLLPLALLLHAARPEVQLVESGGGLVQPGGSLRLSCAASGFSLSRNSVHWVRQAPGKGLEWLGMIWGGGSTDYNSALKSRFTISRDNSKNTLYLQMNSLRAEDTAVYYCARNGGYDVFHYWGQGTTVTVSSGGGGSGGGGSGGGGSQAVVTQEPSLTVSPGGTVTLTCRSSTGAVTTSNYANWVQQKPGQAPRGLIGGTNNRAPWTPARFSGSLLGGKAALTLSGVQPEDEAEYYCALWYSNHLVFGGGTKLTVLGTTTPAPRPPTPAPTIASQPLSLRPEACRPAAGGAVHTRGLDFACDIISFFLALTSTALLFLLFFLTLRFSVVKRGRKKLLYIFKQPFMRPVQTTQEEDGCSCRFPEEEEGGCELRVKFSRSADAPAYQQGQNQLYNELNLGRREEYDVLDKRRGRDPEMGGKPRRKNPQEGLYNELQKDKMAEAYSEIGMKGERRRGKGHDGLYQGLSTATKDTYDALHMQALPPR

SEQ ID NO: 207146 - protein, 672 aa, Artificial Sequence
  Description of Artificial Sequence: Synthetic Chimeric Antigen Receptor
MALPVTALLLPLALLLHAARPEVKLQESGPGLVAPSQSLSFTCTVSGFSLSRNSVHWVRQPPGKGLEWLGMIWGGGSTDYNSALKSRLNISKDSSKSQVFLKMNSLQTDDTAMYFCARNGGYDVFHYWGQGTTVTVSSGGGGSGGGGSGGGGSQAVVTQESALTTSPGETVTLTCRSSTGAVTTSNYANWVQEKPDHLFTGLIGGTNNRAPGVPARFSGSLIGDKAALTITGAQTEDEAIYFCALWYSNHLVFGGGTKLTVLGEPKSPDKTHTCPPCPAPPVAGPSVFLFPPKPKDTLMIARTPEVTCVVVDVSHEDPEVKFNWYVDGVEVHNAKTKPREEQYNSTYRVVSVLTVLHQDWLNGKEYKCKVSNKALPAPIEKTISKAKGQPREPQVYTLPPSRDELTKNQVSLTCLVKGFYPSDIAVEWESNGQPENNYKTTPPVLDSDGSFFLYSKLTVDKSRWQQGNVFSCSVMHEALHNHYTQKSLSLSPGKIYIWAPLAGTCGVLLLSLVITLYCKRGRKKLLYIFKQPFMRPVQTTQEEDGCSCRFPEEEEGGCELRVKFSRSADAPAYQQGQNQLYNELNLGRREEYDVLDKRRGRDPEMGGKPRRKNPQEGLYNELQKDKMAEAYSEIGMKGERRRGKGHDGLYQGLSTATKDTYDALHMQALPPR

SEQ ID NO: 207147 - protein, 672 aa, Artificial Sequence
  Description of Artificial Sequence: Synthetic Chimeric Antigen Receptor
MALPVTALLLPLALLLHAARPEVQLVESGGGLVQPGGSLRLSCAASGFSLSRNSVHWVRQAPGKGLEWLGMIWGGGSTDYNSALKSRFTISRDNSKNTLYLQMNSLRAEDTAVYYCARNGGYDVFHYWGQGTTVTVSSGGGGSGGGGSGGGGSQAVVTQEPSLTVSPGGTVTLTCRSSTGAVTTSNYANWVQQKPGQAPRGLIGGTNNRAPWTPARFSGSLLGGKAALTLSGVQPEDEAEYYCALWYSNHLVFGGGTKLTVLGEPKSPDKTHTCPPCPAPPVAGPSVFLFPPKPKDTLMIARTPEVTCVVVDVSHEDPEVKFNWYVDGVEVHNAKTKPREEQYNSTYRVVSVLTVLHQDWLNGKEYKCKVSNKALPAPIEKTISKAKGQPREPQVYTLPPSRDELTKNQVSLTCLVKGFYPSDIAVEWESNGQPENNYKTTPPVLDSDGSFFLYSKLTVDKSRWQQGNVFSCSVMHEALHNHYTQKSLSLSPGKIYIWAPLAGTCGVLLLSLVITLYCKRGRKKLLYIFKQPFMRPVQTTQEEDGCSCRFPEEEEGGCELRVKFSRSADAPAYQQGQNQLYNELNLGRREEYDVLDKRRGRDPEMGGKPRRKNPQEGLYNELQKDKMAEAYSEIGMKGERRRGKGHDGLYQGLSTATKDTYDALHMQALPPR

SEQ ID NO: 207148 - protein, 675 aa, Artificial Sequence
  Description of Artificial Sequence: Synthetic Chimeric Antigen Receptor
MALPVTALLLPLALLLHAARPEVKLQESGPGLVAPSQSLSFTCTVSGFSLSRNSVHWVRQPPGKGLEWLGMIWGGGSTDYNSALKSRLNISKDSSKSQVFLKMNSLQTDDTAMYFCARNGGYDVFHYWGQGTTVTVSSGGGGSGGGGSGGGGSQAVVTQESALTTSPGETVTLTCRSSTGAVTTSNYANWVQEKPDHLFTGLIGGTNNRAPGVPARFSGSLIGDKAALTITGAQTEDEAIYFCALWYSNHLVFGGGTKLTVLGEPKSPDKTHTCPPCPAPPVAGPSVFLFPPKPKDTLMIARTPEVTCVVVDVSHEDPEVKFNWYVDGVEVHNAKTKPREEQYNSTYRVVSVLTVLHQDWLNGKEYKCKVSNKALPAPIEKTISKAKGQPREPQVYTLPPSRDELTKNQVSLTCLVKGFYPSDIAVEWESNGQPENNYKTTPPVLDSDGSFFLYSKLTVDKSRWQQGNVFSCSVMHEALHNHYTQKSLSLSPGKIISFFLALTSTALLFLLFFLTLRFSVVKRGRKKLLYIFKQPFMRPVQTTQEEDGCSCRFPEEEEGGCELRVKFSRSADAPAYQQGQNQLYNELNLGRREEYDVLDKRRGRDPEMGGKPRRKNPQEGLYNELQKDKMAEAYSEIGMKGERRRGKGHDGLYQGLSTATKDTYDALHMQALPPR

SEQ ID NO: 207149 - protein, 675 aa, Artificial Sequence
  Description of Artificial Sequence: Synthetic Chimeric Antigen Receptor
MALPVTALLLPLALLLHAARPEVQLVESGGGLVQPGGSLRLSCAASGFSLSRNSVHWVRQAPGKGLEWLGMIWGGGSTDYNSALKSRFTISRDNSKNTLYLQMNSLRAEDTAVYYCARNGGYDVFHYWGQGTTVTVSSGGGGSGGGGSGGGGSQAVVTQEPSLTVSPGGTVTLTCRSSTGAVTTSNYANWVQQKPGQAPRGLIGGTNNRAPWTPARFSGSLLGGKAALTLSGVQPEDEAEYYCALWYSNHLVFGGGTKLTVLGEPKSPDKTHTCPPCPAPPVAGPSVFLFPPKPKDTLMIARTPEVTCVVVDVSHEDPEVKFNWYVDGVEVHNAKTKPREEQYNSTYRVVSVLTVLHQDWLNGKEYKCKVSNKALPAPIEKTISKAKGQPREPQVYTLPPSRDELTKNQVSLTCLVKGFYPSDIAVEWESNGQPENNYKTTPPVLDSDGSFFLYSKLTVDKSRWQQGNVFSCSVMHEALHNHYTQKSLSLSPGKIISFFLALTSTALLFLLFFLTLRFSVVKRGRKKLLYIFKQPFMRPVQTTQEEDGCSCRFPEEEEGGCELRVKFSRSADAPAYQQGQNQLYNELNLGRREEYDVLDKRRGRDPEMGGKPRRKNPQEGLYNELQKDKMAEAYSEIGMKGERRRGKGHDGLYQGLSTATKDTYDALHMQALPPR

SEQ ID NO: 207150 - protein, 606 aa, Artificial Sequence
  Description of Artificial Sequence: Synthetic Chimeric Antigen Receptor
MHPLLNPLLLALGLMALLLTTVIALTCLGGFASPGPVPPSTALRKLIEELVNITQNQKAPLCNGSMVWSINLTAGMYCAALESLINVSGCSAIEKTQRMLSGFCPHKVSAGQFSSLHVRDTKIEVAQFVKDLLLHLKKLFKEGQFNPRKPTTTPAPRPPTPAPTIASQPLSLRPEACRPAAGGAVHTRGLDFAQLLCYLLDGILFIYGVILTALFLRVVTFWVRSKRSRLLHSDYMNMTPRRPGPTRKHYQPYAPPRDFAAYRSTRKFSRSADAPAYQQGQNQLYNELNLGRREEYDVLDKRRGRDPEMGGKPRRKNPQEGLYNELQKDKMAEAYSEIGMKGERRRGKGHDGLYQGLSTATKDTYDALHMQALPPRQPAAAEGRGSLLTCGDVEENPGPMDKDCEMKRTTLDSPLGKLELSGCEQGLHEIKLLGKGTSAADAVEVPAPAAVLGGPEPLMQCTAWLNAYFHQPEAIEEFPVPALHHPVFQQESFTRQVLWKLLKVVKFGEVISYQQLAALAGNPKAARAVGGAMRGNPVKILIPCHRVVCSSGAVGNYSGGLAVKEWLLAHEGHRLGKPGLGGSSGLAGAWLKGAGATSGSPPAGRN

SEQ ID NO: 207151 - protein, 606 aa, Artificial Sequence
  Description of Artificial Sequence: Synthetic Chimeric Antigen Receptor
MHPLLNPLLLALGLMALLLTTVIALTCLGGFASPGPVPPSTALRYLIEELVNITQNQKAPLCNGSMVWSINLTAGMYCAALESLINVSGCSAIEKTQRMLSGFCPHKVSAGQFSSLHVRDTKIEVAQFVKDLLLHLKKLFREGQFNPRKPTTTPAPRPPTPAPTIASQPLSLRPEACRPAAGGAVHTRGLDFAQLLCYLLDGILFIYGVILTALFLRVVTFWVRSKRSRLLHSDYMNMTPRRPGPTRKHYQPYAPPRDFAAYRSTRKFSRSADAPAYQQGQNQLYNELNLGRREEYDVLDKRRGRDPEMGGKPRRKNPQEGLYNELQKDKMAEAYSEIGMKGERRRGKGHDGLYQGLSTATKDTYDALHMQALPPRQPAAAEGRGSLLTCGDVEENPGPMDKDCEMKRTTLDSPLGKLELSGCEQGLHEIKLLGKGTSAADAVEVPAPAAVLGGPEPLMQCTAWLNAYFHQPEAIEEFPVPALHHPVFQQESFTRQVLWKLLKVVKFGEVISYQQLAALAGNPKAARAVGGAMRGNPVKILIPCHRVVCSSGAVGNYSGGLAVKEWLLAHEGHRLGKPGLGGSSGLAGAWLKGAGATSGSPPAGRN

SEQ ID NO: 207152 - protein, 889 aa, Artificial Sequence
  Description of Artificial Sequence: Synthetic Chimeric Antigen Receptor
MLLLVTSLLLCELPHPAFLLIPGPVPPSTALRYLIEELVNITQNQKAPLCNGSMVWSINLTAGMYCAALESLINVSGCSAIEKTQRMLSGFCPHKVSAGQFSSLHVRDTKIEVAQFVKDLLLHLKKLFREGRFNESKYGPPCPPCPAPEFEGGPSVFLFPPKPKDTLMISRTPEVTCVVVDVSQEDPEVQFNWYVDGVEVHNAKTKPREEQFQSTYRVVSVLTVLHQDWLNGKEYKCKVSNKGLPSSIEKTISKAKGQPREPQVYTLPPSQEEMTKNQVSLTCLVKGFYPSDIAVEWESNGQPENNYKTTPPVLDSDGSFFLYSRLTVDKSRWQEGNVFSCSVMHEALHNHYTQKSLSLSLGKMALIVLGGVAGLLLFIGLGIFFKRGRKKLLYIFKQPFMRPVQTTQEEDGCSCRFPEEEEGGCELGGGRVKFSRSADAPAYQQGQNQLYNELNLGRREEYDVLDKRRGRDPEMGGKPRRKNPQEGLYNELQKDKMAEAYSEIGMKGERRRGKGHDGLYQGLSTATKDTYDALHMQALPPRLEGGGEGRGSLLTCGDVEENPGPRMPPPRLLFFLLFLTPMEVRPEEPLVVKVEEGDNAVLQCLKGTSDGPTQQLTWSRESPLKPFLKLSLGLPGLGIHMRPLAIWLFIFNVSQQMGGFYLCQPGPPSEKAWQPGWTVNVEGSGELFRWNVSDLGGLGCGLKNRSSEGPSSPSGKLMSPKLYVWAKDRPEIWEGEPPCVPPRDSLNQSLSQDLTMAPGSTLWLSCGVPPDSVSRGPLSWTHVHPKGPKSLLSLELKDDRPARDMWVMETGLLLPRATAQDAGKYYCHRGNLTMSFHLEITARPVLWHWLLRTGGWKVSAVTLAYLIFCLCSLVGILHLQRALVLRRKR

SEQ ID NO: 207153 - protein, 200 aa, Artificial Sequence
  Description of Artificial Sequence: Synthetic Chimeric Antigen Receptor
DLEPKSCDKTHTCPPCPDPKFWVLVVVGGVLACYSLLVTVAFIIFWVRSKRSRLLHSDYMNMTPRRPGPTRKHYQPYAPPRDFAAYRSRVKFSRSADAPAYQQGQNQLYNELNLGRREEYDVLDKRRGRDPEMGGKPRRKNPQEGLYNELQKDKMAEAYSEIGMKGERRRGKGHDGLYQGLSTATKDTYDALHMQALPPR

SEQ ID NO: 207154 - protein, 419 aa, Artificial Sequence
  Description of Artificial Sequence: Synthetic Chimeric Antigen Receptor
DPAEPKSPDKTHTCPPCPAPELLGGPSVFLFPPKPKDTLMISRTPEVTCVVVDVSHEDPEVKFNWYVDGVEVHNAKTKPREEQYNSTYRVVSVLTVLHQDWLNGKEYKCKVSNKALPAPIEKTISKAKGQPREPQVYTLPPSRDELTKNQVSLTCLVKGFYPSDIAVEWESNGQPENNYKTTPPVLDSDGSFFLYSKLTVDKSRWQQGNVFSCSVMHEALHNHYTQKSLSLSPGKKDPKFWVLVVVGGVLACYSLLVTVAFIIFWVRSKRSRLLHSDYMNMTPRRPGPTRKHYQPYAPPRDFAAYRSRVKFSRSADAPAYQQGQNQLYNELNLGRREEYDVLDKRRGRDPEMGGKPRRKNPQEGLYNELQKDKMAEAYSEIGMKGERRRGKGHDGLYQGLSTATKDTYDALHMQALPPR

SEQ ID NO: 207155 - protein, 467 aa, Artificial Sequence
  Description of Artificial Sequence: Synthetic Chimeric Antigen Receptor
MDWIWRILFLVGAATGAHSQVQLQQPGAELVRPGASVKLSCKASGYTFSNYLMNWVKQRPEQDLDWIGRIDPYDGDIDYNQNFKDKAILTVDKSSSTAYMQLSSLTSEDSAVYYCARGYGTAYGVDYWGQGTSVTVSSAKTTPPKLEEGEFSEARVDIVLTQSPASLAVSLGQRATISCRASESVDNYGISFMNWFQQKPGQPPKLLIYAASRQGSGVPARFSGSGSGTDFSLNIHPMEEDDTAMYFCQQSKEVPWTFGGGTKLEIKDLEPKSCDKTHTCPPCPDPKFWVLVVVGGVLACYSLLVTVAFIIFWVRSKRSRLLHSDYMNMTPRRPGPTRKHYQPYAPPRDFAAYRSRVKFSRSADAPAYQQGQNQLYNELNLGRREEYDVLDKRRGRDPEMGGKPRRKNPQEGLYNELQKDKMAEAYSEIGMKGERRRGKGHDGLYQGLSTATKDTYDALHMQALPPR

SEQ ID NO: 207156 - protein, 487 aa, Artificial Sequence
  Description of Artificial Sequence: Synthetic Chimeric Antigen Receptor
MVLLVTSLLLCELPHPAFLLIPDIQQVQLQQSGPELEKPGASVKISCKASGYSFTGYTMNWVKQSHGKSLEWIGLITPYNGASSYNQKFRGKATLTVDKSSSTAYMDLLSLTSEDSAVYFCARGGYDGRGFDYWGQGTTVTVSSGGGGSGGGGSGGGGSDIELTQSPAIMSASPGEKVTMTCSASSSVSYMHWYQQKSGTSPKRWIYDTSKLASGVPGRFSGSGSGNSYSLTISSVEAEDDATYYCQQWSGYPLTFGAGTKLEIKAAAIEVMYPPPYLDNEKSNGTIIHVKGKHLCPSPLFPGPSKPFWVLVVVGGVLACYSLLVTVAFIIFWVRSKRSRLLHSDYMNMTPRRPGPTRKHYQPYAPPRDFAAYRSRVKFSRSADAPAYQQGQNQLYNELNLGRREEYDVLDKRRGRDPEMGGKPRRKNPQEGLYNELQKDKMAEAYSEIGMKGERRRGKGHDGLYQGLSTATKDTYDALHMQALPPR

SEQ ID NO: 207157 - protein, 688 aa, Artificial Sequence
  Description of Artificial Sequence: Synthetic Chimeric Antigen Receptor
MDWIWRILFLVGAATGAHSQVQLQQPGAELVRPGASVKLSCKASGYTFSNYLMNWVKQRPEQDLDWIGRIDPYDGDIDYNQNFKDKAILTVDKSSSTAYMQLSSLTSEDSAVYYCARGYGTAYGVDYWGQGTSVTVSSAKTTPPKLEEGEFSEARVDIVLTQSPASLAVSLGQRATISCRASESVDNYGISFMNWFQQKPGQPPKLLIYAASRQGSGVPARFSGSGSGTDFSLNIHPMEEDDTAMYFCQQSKEVPWTFGGGTKLEIKAEDPAEPKSPDKTHTCPPCPAPELLGGPSVFLFPPKPKDTLMISRTPEVTCVVVDVSHEDPEVKFNWYVDGVEVHNAKTKPREEQYNSTYRVVSVLTVLHQDWLNGKEYKCKVSNKALPAPIEKTISKAKGQPREPQVYTLPPSRDELTKNQVSLTCLVKGFYPSDIAVEWESNGQPENNYKTTPPVLDSDGSFFLYSKLTVDKSRWQQGNVFSCSVMHEALHNHYTQKSLSLSPGKKDPKFWVLVVVGGVLACYSLLVTVAFIIFWVRSKRSRLLHSDYMNMTPRRPGPTRKHYQPYAPPRDFAAYRSRVKFSRSADAPAYQQGQNQLYNELNLGRREEYDVLDKRRGRDPEMGGKPRRKNPQEGLYNELQKDKMAEAYSEIGMKGERRRGKGHDGLYQGLSTATKDTYDALHMQALPPR

SEQ ID NO: 207158 - protein, 340 aa, Artificial Sequence
  Description of Artificial Sequence: Synthetic Chimeric Antigen Receptor
GPVPPSTALRYLIEELVNITQNQKAPLCNGSMVWSINLTAGMYCAALESLINVSGCSAIEKTQRMLSGFCPHKVSAGQFSSLHVRDTKIEVAQFVKDLLLHLKKLFREGRFNAKPTTTPAPRPPTPAPTIASQPLSLRPEACRPAAGGAVHTRGLDFACDIYIWAPLAGTCGVLLLSLVITLYKRGRKKLLYIFKQPFMRPVQTTQEEDGCSCRFPEEEEGGCELGGGRVKFSRSADAPAYQQGQNQLYNELNLGRREEYDVLDKRRGRDPEMGGKPRRKNPQEGLYNELQKDKMAEAYSEIGMKGERRRGKGHDGLYQGLSTATKDTYDALHMQALPPR

SEQ ID NO: 207159 - protein, 341 aa, Artificial Sequence
  Description of Artificial Sequence: Synthetic Chimeric Antigen Receptor
GPVPPSTALRYLIEELVNITQNQKAPLCNGSMVWSINLTAGMYCAALESLINVSGCSAIEKTQRMLSGFCPHKVSAGQFSSLHVRDTKIEVAQFVKDLLLHLKKLFREGRFNAKPTTTPAPRPPTPAPTIASQPLSLRPEACRPAAGGAVHTRGLDFACDIYIWAPLAGTCGVLLLSLVITGGGKRGRKKLLYIFKQPFMRPVQTTQEEDGCSCRFPEEEEGGCELGGGRVKFSRSADAPAYQQGQNQLYNELNLGRREEYDVLDKRRGRDPEMGGKPRRKNPQEGLYNELQKDKMAEAYSEIGMKGERRRGKGHDGLYQGLSTATKDTYDALHMQALPPR

SEQ ID NO: 207160 - protein, 351 aa, Artificial Sequence
  Description of Artificial Sequence: Synthetic Chimeric Antigen Receptor
GPVPPSTALRYLIEELVNITQNQKAPLCNGSMVWSINLTAGMYCAALESLINVSGCSAIEKTQRMLSGFCPHKVSAGQFSSLHVRDTKIEVAQFVKDLLLHLKKLFREGRFNGGGSSGGGSGMFWVLVVVGGVLACYSLLVTVAFIIFWVRSKRSRGGHSDYMNMTPRRPGPTRKHYQPYAPPRDFAAYRSGGGKRGRKKLLYIFKQPFMRPVQTTQEEDGCSCRFPEEEEGGCELGGGRVKFSRSADAPAYQQGQNQLYNELNLGRREEYDVLDKRRGRDPEMGGKPRRKNPQEGLYNELQKDKMAEAYSEIGMKGERRRGKGHDGLYQGLSTATKDTYDALHMQALPPR

SEQ ID NO: 207161 - protein, 362 aa, Artificial Sequence
  Description of Artificial Sequence: Synthetic Chimeric Antigen Receptor
MLLLVTSLLLCELPHPAFLLIPGPVPPSTALRYLIEELVNITQNQKAPLCNGSMVWSINLTAGMYCAALESLINVSGCSAIEKTQRMLSGFCPHKVSAGQFSSLHVRDTKIEVAQFVKDLLLHLKKLFREGRFNAKPTTTPAPRPPTPAPTIASQPLSLRPEACRPAAGGAVHTRGLDFACDIYIWAPLAGTCGVLLLSLVITLYKRGRKKLLYIFKQPFMRPVQTTQEEDGCSCRFPEEEEGGCELGGGRVKFSRSADAPAYQQGQNQLYNELNLGRREEYDVLDKRRGRDPEMGGKPRRKNPQEGLYNELQKDKMAEAYSEIGMKGERRRGKGHDGLYQGLSTATKDTYDALHMQALPPR

SEQ ID NO: 207162 - protein, 363 aa, Artificial Sequence
  Description of Artificial Sequence: Synthetic Chimeric Antigen Receptor
GPVPPSTALRYLIEELVNITQNQKAPLCNGSMVWSINLTAGMYCAALESLINVSGCSAIEKTQRMLSGFCPHKVSAGQFSSLHVRDTKIEVAQFVKDLLLHLKKLFREGRFNESKYGPPCPPCPGGGSSGGGSGMFWVLVVVGGVLACYSLLVTVAFIIFWVRSKRSRGGHSDYMNMTPRRPGPTRKHYQPYAPPRDFAAYRSGGGKRGRKKLLYIFKQPFMRPVQTTQEEDGCSCRFPEEEEGGCELGGGRVKFSRSADAPAYQQGQNQLYNELNLGRREEYDVLDKRRGRDPEMGGKPRRKNPQEGLYNELQKDKMAEAYSEIGMKGERRRGKGHDGLYQGLSTATKDTYDALHMQALPPR

SEQ ID NO: 207163 - protein, 363 aa, Artificial Sequence
  Description of Artificial Sequence: Synthetic Chimeric Antigen Receptor
MLLLVTSLLLCELPHPAFLLIPGPVPPSTALRYLIEELVNITQNQKAPLCNGSMVWSINLTAGMYCAALESLINVSGCSAIEKTQRMLSGFCPHKVSAGQFSSLHVRDTKIEVAQFVKDLLLHLKKLFREGRFNAKPTTTPAPRPPTPAPTIASQPLSLRPEACRPAAGGAVHTRGLDFACDIYIWAPLAGTCGVLLLSLVITGGGKRGRKKLLYIFKQPFMRPVQTTQEEDGCSCRFPEEEEGGCELGGGRVKFSRSADAPAYQQGQNQLYNELNLGRREEYDVLDKRRGRDPEMGGKPRRKNPQEGLYNELQKDKMAEAYSEIGMKGERRRGKGHDGLYQGLSTATKDTYDALHMQALPPR

SEQ ID NO: 207164 - protein, 373 aa, Artificial Sequence
  Description of Artificial Sequence: Synthetic Chimeric Antigen Receptor
MLLLVTSLLLCELPHPAFLLIPGPVPPSTALRYLIEELVNITQNQKAPLCNGSMVWSINLTAGMYCAALESLINVSGCSAIEKTQRMLSGFCPHKVSAGQFSSLHVRDTKIEVAQFVKDLLLHLKKLFREGRFNGGGSSGGGSGMFWVLVVVGGVLACYSLLVTVAFIIFWVRSKRSRGGHSDYMNMTPRRPGPTRKHYQPYAPPRDFAAYRSGGGKRGRKKLLYIFKQPFMRPVQTTQEEDGCSCRFPEEEEGGCELGGGRVKFSRSADAPAYQQGQNQLYNELNLGRREEYDVLDKRRGRDPEMGGKPRRKNPQEGLYNELQKDKMAEAYSEIGMKGERRRGKGHDGLYQGLSTATKDTYDALHMQALPPR

SEQ ID NO: 207165 - protein, 385 aa, Artificial Sequence
  Description of Artificial Sequence: Synthetic Chimeric Antigen Receptor
MLLLVTSLLLCELPHPAFLLIPGPVPPSTALRYLIEELVNITQNQKAPLCNGSMVWSINLTAGMYCAALESLINVSGCSAIEKTQRMLSGFCPHKVSAGQFSSLHVRDTKIEVAQFVKDLLLHLKKLFREGRFNESKYGPPCPPCPGGGSSGGGSGMFWVLVVVGGVLACYSLLVTVAFIIFWVRSKRSRGGHSDYMNMTPRRPGPTRKHYQPYAPPRDFAAYRSGGGKRGRKKLLYIFKQPFMRPVQTTQEEDGCSCRFPEEEEGGCELGGGRVKFSRSADAPAYQQGQNQLYNELNLGRREEYDVLDKRRGRDPEMGGKPRRKNPQEGLYNELQKDKMAEAYSEIGMKGERRRGKGHDGLYQGLSTATKDTYDALHMQALPPR

SEQ ID NO: 207166 - protein, 388 aa, Artificial Sequence
  Description of Artificial Sequence: Synthetic Chimeric Antigen Receptor
GPVPPSTALRYLIEELVNITQNQKAPLCNGSMVWSINLTAGMYCAALESLINVSGCSAIEKTQRMLSGFCPHKVSAGQFSSLHVRDTKIEVAQFVKDLLLHLKKLFREGRFNAKPTTTPAPRPPTPAPTIASQPLSLRPEACRPAAGGAVHTRGLDFACDFWVLVVVGGVLACYSLLVTVAFIIFWVRSKRSRGGHSDYMNMTPRRPGPTRKHYQPYAPPRDFAAYRSGGGKRGRKKLLYIFKQPFMRPVQTTQEEDGCSCRFPEEEEGGCELGGGRVKFSRSADAPAYQQGQNQLYNELNLGRREEYDVLDKRRGRDPEMGGKPRRKNPQEGLYNELQKDKMAEAYSEIGMKGERRRGKGHDGLYQGLSTATKDTYDALHMQALPPR

SEQ ID NO: 207167 - protein, 410 aa, Artificial Sequence
  Description of Artificial Sequence: Synthetic Chimeric Antigen Receptor
MLLLVTSLLLCELPHPAFLLIPGPVPPSTALRYLIEELVNITQNQKAPLCNGSMVWSINLTAGMYCAALESLINVSGCSAIEKTQRMLSGFCPHKVSAGQFSSLHVRDTKIEVAQFVKDLLLHLKKLFREGRFNAKPTTTPAPRPPTPAPTIASQPLSLRPEACRPAAGGAVHTRGLDFACDFWVLVVVGGVLACYSLLVTVAFIIFWVRSKRSRGGHSDYMNMTPRRPGPTRKHYQPYAPPRDFAAYRSGGGKRGRKKLLYIFKQPFMRPVQTTQEEDGCSCRFPEEEEGGCELGGGRVKFSRSADAPAYQQGQNQLYNELNLGRREEYDVLDKRRGRDPEMGGKPRRKNPQEGLYNELQKDKMAEAYSEIGMKGERRRGKGHDGLYQGLSTATKDTYDALHMQALPPR

SEQ ID NO: 207168 - protein, 420 aa, Artificial Sequence
  Description of Artificial Sequence: Synthetic Chimeric Antigen Receptor
GPVPPSTALRYLIEELVNITQNQKAPLCNGSMVWSINLTAGMYCAALESLINVSGCSAIEKTQRMLSGFCPHKVSAGQFSSLHVRDTKIEVAQFVKDLLLHLKKLFREGRFNESKYGPPCPPCPGGGSSGGGSGGQPREPQVYTLPPSQEEMTKNQVSLTCLVKGFYPSDIAVEWESNGQPENNYKTTPPVLDSDGSFFLYSRLTVDKSRWQEGNVFSCSVMHEALHNHYTQKSLSLSLGKMALIVLGGVAGLLLFIGLGIFFKRGRKKLLYIFKQPFMRPVQTTQEEDGCSCRFPEEEEGGCELGGGRVKFSRSADAPAYQQGQNQLYNELNLGRREEYDVLDKRRGRDPEMGGKPRRKNPQEGLYNELQKDKMAEAYSEIGMKGERRRGKGHDGLYQGLSTATKDTYDALHMQALPPR

SEQ ID NO: 207169 - protein, 442 aa, Artificial Sequence
  Description of Artificial Sequence: Synthetic Chimeric Antigen Receptor
MLLLVTSLLLCELPHPAFLLIPGPVPPSTALRYLIEELVNITQNQKAPLCNGSMVWSINLTAGMYCAALESLINVSGCSAIEKTQRMLSGFCPHKVSAGQFSSLHVRDTKIEVAQFVKDLLLHLKKLFREGRFNESKYGPPCPPCPGGGSSGGGSGGQPREPQVYTLPPSQEEMTKNQVSLTCLVKGFYPSDIAVEWESNGQPENNYKTTPPVLDSDGSFFLYSRLTVDKSRWQEGNVFSCSVMHEALHNHYTQKSLSLSLGKMALIVLGGVAGLLLFIGLGIFFKRGRKKLLYIFKQPFMRPVQTTQEEDGCSCRFPEEEEGGCELGGGRVKFSRSADAPAYQQGQNQLYNELNLGRREEYDVLDKRRGRDPEMGGKPRRKNPQEGLYNELQKDKMAEAYSEIGMKGERRRGKGHDGLYQGLSTATKDTYDALHMQALPPR

SEQ ID NO: 207170 - protein, 470 aa, Artificial Sequence
  Description of Artificial Sequence: Synthetic Chimeric Antigen Receptor
GPVPPSTALRYLIEELVNITQNQKAPLCNGSMVWSINLTAGMYCAALESLINVSGCSAIEKTQRMLSGFCPHKVSAGQFSSLHVRDTKIEVAQFVKDLLLHLKKLFREGRFNESKYGPPCPPCPGGGSSGGGSGGQPREPQVYTLPPSQEEMTKNQVSLTCLVKGFYPSDIAVEWESNGQPENNYKTTPPVLDSDGSFFLYSRLTVDKSRWQEGNVFSCSVMHEALHNHYTQKSLSLSLGKMFWVLVVVGGVLACYSLLVTVAFIIFWVRSKRSRGGHSDYMNMTPRRPGPTRKHYQPYAPPRDFAAYRSGGGKRGRKKLLYIFKQPFMRPVQTTQEEDGCSCRFPEEEEGGCELGGGRVKFSRSADAPAYQQGQNQLYNELNLGRREEYDVLDKRRGRDPEMGGKPRRKNPQEGLYNELQKDKMAEAYSEIGMKGERRRGKGHDGLYQGLSTATKDTYDALHMQALPPR

SEQ ID NO: 207171 - protein, 492 aa, Artificial Sequence
  Description of Artificial Sequence: Synthetic Chimeric Antigen Receptor
MLLLVTSLLLCELPHPAFLLIPGPVPPSTALRYLIEELVNITQNQKAPLCNGSMVWSINLTAGMYCAALESLINVSGCSAIEKTQRMLSGFCPHKVSAGQFSSLHVRDTKIEVAQFVKDLLLHLKKLFREGRFNESKYGPPCPPCPGGGSSGGGSGGQPREPQVYTLPPSQEEMTKNQVSLTCLVKGFYPSDIAVEWESNGQPENNYKTTPPVLDSDGSFFLYSRLTVDKSRWQEGNVFSCSVMHEALHNHYTQKSLSLSLGKMFWVLVVVGGVLACYSLLVTVAFIIFWVRSKRSRGGHSDYMNMTPRRPGPTRKHYQPYAPPRDFAAYRSGGGKRGRKKLLYIFKQPFMRPVQTTQEEDGCSCRFPEEEEGGCELGGGRVKFSRSADAPAYQQGQNQLYNELNLGRREEYDVLDKRRGRDPEMGGKPRRKNPQEGLYNELQKDKMAEAYSEIGMKGERRRGKGHDGLYQGLSTATKDTYDALHMQALPPR

SEQ ID NO: 207172 - protein, 519 aa, Artificial Sequence
  Description of Artificial Sequence: Synthetic Chimeric Antigen Receptor
GPVPPSTALRYLIEELVNITQNQKAPLCNGSMVWSINLTAGMYCAALESLINVSGCSAIEKTQRMLSGFCPHKVSAGQFSSLHVRDTKIEVAQFVKDLLLHLKKLFREGRFNESKYGPPCPPCPAPEFEGGPSVFLFPPKPKDTLMISRTPEVTCVVVDVSQEDPEVQFNWYVDGVEVHNAKTKPREEQFQSTYRVVSVLTVLHQDWLNGKEYKCKVSNKGLPSSIEKTISKAKGQPREPQVYTLPPSQEEMTKNQVSLTCLVKGFYPSDIAVEWESNGQPENNYKTTPPVLDSDGSFFLYSRLTVDKSRWQEGNVFSCSVMHEALHNHYTQKSLSLSLGKIYIWAPLAGTCGVLLLSLVITKRGRKKLLYIFKQPFMRPVQTTQEEDGCSCRFPEEEEGGCELGGGRVKFSRSADAPAYQQGQNQLYNELNLGRREEYDVLDKRRGRDPEMGGKPRRKNPQEGLYNELQKDKMAEAYSEIGMKGERRRGKGHDGLYQGLSTATKDTYDALHMQALPPR

SEQ ID NO: 207173 - protein, 541 aa, Artificial Sequence
  Description of Artificial Sequence: Synthetic Chimeric Antigen Receptor
MLLLVTSLLLCELPHPAFLLIPGPVPPSTALRYLIEELVNITQNQKAPLCNGSMVWSINLTAGMYCAALESLINVSGCSAIEKTQRMLSGFCPHKVSAGQFSSLHVRDTKIEVAQFVKDLLLHLKKLFREGRFNESKYGPPCPPCPAPEFEGGPSVFLFPPKPKDTLMISRTPEVTCVVVDVSQEDPEVQFNWYVDGVEVHNAKTKPREEQFQSTYRVVSVLTVLHQDWLNGKEYKCKVSNKGLPSSIEKTISKAKGQPREPQVYTLPPSQEEMTKNQVSLTCLVKGFYPSDIAVEWESNGQPENNYKTTPPVLDSDGSFFLYSRLTVDKSRWQEGNVFSCSVMHEALHNHYTQKSLSLSLGKIYIWAPLAGTCGVLLLSLVITKRGRKKLLYIFKQPFMRPVQTTQEEDGCSCRFPEEEEGGCELGGGRVKFSRSADAPAYQQGQNQLYNELNLGRREEYDVLDKRRGRDPEMGGKPRRKNPQEGLYNELQKDKMAEAYSEIGMKGERRRGKGHDGLYQGLSTATKDTYDALHMQALPPR

SEQ ID NO: 207174 - protein, 570 aa, Artificial Sequence
  Description of Artificial Sequence: Synthetic Chimeric Antigen Receptor
GPVPPSTALRYLIEELVNITQNQKAPLCNGSMVWSINLTAGMYCAALESLINVSGCSAIEKTQRMLSGFCPHKVSAGQFSSLHVRDTKIEVAQFVKDLLLHLKKLFREGRFNESKYGPPCPPCPAPEFEGGPSVFLFPPKPKDTLMISRTPEVTCVVVDVSQEDPEVQFNWYVDGVEVHNAKTKPREEQFQSTYRVVSVLTVLHQDWLNGKEYKCKVSNKGLPSSIEKTISKAKGQPREPQVYTLPPSQEEMTKNQVSLTCLVKGFYPSDIAVEWESNGQPENNYKTTPPVLDSDGSFFLYSRLTVDKSRWQEGNVFSCSVMHEALHNHYTQKSLSLSLGKMFWVLVVVGGVLACYSLLVTVAFIIFWVRSKRSRGGHSDYMNMTPRRPGPTRKHYQPYAPPRDFAAYRSGGGKRGRKKLLYIFKQPFMRPVQTTQEEDGCSCRFPEEEEGGCELGGGRVKFSRSADAPAYQQGQNQLYNELNLGRREEYDVLDKRRGRDPEMGGKPRRKNPQEGLYNELQKDKMAEAYSEIGMKGERRRGKGHDGLYQGLSTATKDTYDALHMQALPPR

SEQ ID NO: 207175 - protein, 592 aa, Artificial Sequence
  Description of Artificial Sequence: Synthetic Chimeric Antigen Receptor
MLLLVTSLLLCELPHPAFLLIPGPVPPSTALRYLIEELVNITQNQKAPLCNGSMVWSINLTAGMYCAALESLINVSGCSAIEKTQRMLSGFCPHKVSAGQFSSLHVRDTKIEVAQFVKDLLLHLKKLFREGRFNESKYGPPCPPCPAPEFEGGPSVFLFPPKPKDTLMISRTPEVTCVVVDVSQEDPEVQFNWYVDGVEVHNAKTKPREEQFQSTYRVVSVLTVLHQDWLNGKEYKCKVSNKGLPSSIEKTISKAKGQPREPQVYTLPPSQEEMTKNQVSLTCLVKGFYPSDIAVEWESNGQPENNYKTTPPVLDSDGSFFLYSRLTVDKSRWQEGNVFSCSVMHEALHNHYTQKSLSLSLGKMFWVLVVVGGVLACYSLLVTVAFIIFWVRSKRSRGGHSDYMNMTPRRPGPTRKHYQPYAPPRDFAAYRSGGGKRGRKKLLYIFKQPFMRPVQTTQEEDGCSCRFPEEEEGGCELGGGRVKFSRSADAPAYQQGQNQLYNELNLGRREEYDVLDKRRGRDPEMGGKPRRKNPQEGLYNELQKDKMAEAYSEIGMKGERRRGKGHDGLYQGLSTATKDTYDALHMQALPPR

SEQ ID NO: 207176 - protein, 688 aa, Artificial Sequence
  Description of Artificial Sequence: Synthetic Chimeric Antigen Receptor
MEFGLSWLFLVAILKGVQCSRDIVMTQSQKFMSTSVGDRVSVTCKASQNVGTNVAWYQQKPGQSPKALIYSTSYRYSGVPDRFTGSGSGTDFTLTISNVQSEDLAEYFCQQYNSYPYTFGGGTKLEIKGGGGSGGGGSGGGGSEVQLQQSGAELVKPGASVKLSCTASGFNIKDTYMHWVKQRPEQGLEWIGRIDPANGNTKYDPKFQGKATIIADTSSNTAYLQLSSLTSEDTAVYYCARGVYHDYDGDYWGQGTTLTVSSYVTVSSQDPAEPKSPDKTHTCPPCPAPELLGGPSVFLFPPKPKDTLMISRTPEVTCVVVDVSHEDPEVKFNWYVDGVEVHNAKTKPREEQYNSTYRVVSVLTVLHQDWLNGKEYKCKVSNKALPAPIEKTISKAKGQPREPQVYTLPPSRDELTKNQVSLTCLVKGFYPSDIAVEWESNGQPENNYKTTPPVLDSDGSFFLYSKLTVDKSRWQQGNVFSCSVMHEALHNHYTQKSLSLSPGKKDPKFWVLVVVGGVLACYSLLVTVAFIIFWVRSKRSRLLHSDYMNMTPRRPGPTRKHYQPYAPPRDFAAYRSRVKFSRSADAPAYQQGQNQLYNELNLGRREEYDVLDKRRGRDPEMGGKPRRKNPQEGLYNELQKDKMAEAYSEIGMKGERRRGKGHDGLYQGLSTATKDTYDALHMQALPPR

SEQ ID NO: 207177 - protein, 488 aa, Artificial Sequence
  Description of Artificial Sequence: Synthetic Chimeric Antigen Receptor
MALPVTALLLPLALLLHAARPGSQVQLQQSGPELEKPGASVKISCKASGYSFTGYTMNWVKQSHGKSLEWIGLITPYNGASSYNQKFRGKATLTVDKSSSTAYMDLLSLTSEDSAVYFCARGGYDGRGFDYWGQGTTVTVSSGGGGSGGGGSSGGGSDIELTQSPAIMSASPGEKVTMTCSASSSVSYMHWYQQKSGTSPKRWIYDTSKLASGVPGRFSGSGSGNSYSLTISSVEAEDDATYYCQQWSKHPLTYGAGTKLEIKASTTTPAPRPPTPAPTIASQPLSLRPEACRPAAGGAVHTRGLDFACDIYIWAPLAGTCGVLLLSLVITLYCKRGRKKLLYIFKQPFMRPVQTTQEEDGCSCRFPEEEEGGCELRVKFSRSADAPAYKQGQNQLYNELNLGRREEYDVLDKRRGRDPEMGGKPRRKNPQEGLYNELQKDKMAEAYSEIGMKGERRRGKGHDGLYQGLSTATKDTYDALHMQALPPR

SEQ ID NO: 207178 - protein, 480 aa, Artificial Sequence
  Description of Artificial Sequence: Synthetic polypeptide
MALPVTALLLPLALLLHAARPQVQLVQSGGGLVQPGRSLRLSCAASGFTFDDYAMHWVRQAPGKGLEWVSGISWNSGSIGYADSVKGRFTISRDNAKNSLYLQMNSLRAEDTAVYYCAKDGSSSWSWGYFDYWGQGTLVTVSSGGGGSGGGGSGGGGSSSELTQDPAVSVALGQTVRTTCQGDALRSYYASWYQQKPGQAPMLVIYGKNNRPSGIPDRFSGSDSGDTASLTITGAQAEDEADYYCNSRDSSGYPVFGTGTKVTVLTTTPAPRPPTPAPTIASQPLSLRPEACRPAAGGAVHTRGLDFACDIYIWAPLAGTCGVLLLSLVITLYCKRGRKKLLYIFKQPFMRPVQTTQEEDGCSCRFPEEEEGGCELRVKFSRSADAPAYKQGQNQLYNELNLGRREEYDVLDKRRGRDPEMGGKPRRKNPQEGLYNELQKDKMAEAYSEIGMKGERRRGKGHDGLYQGLSTATKDTYDAL

SEQ ID NO: 207179 - protein, 445 aa, Artificial Sequence
  Description of Artificial Sequence: Synthetic Chimeric Antigen Receptor
MALPVTALLLPLALLLHAARPEVQLVESGGGLVKPGGSLRLSCAASGFTFSRYGMSWVRQAPGKRLEWVSTISGGGTYIYYPDSVKGRFTISRDNAKNTLYLQMNSLRAEDTAVYYCTRDNYGRNYDYGMDYWGQGTLVTVSSGGGGSGGGGSGGGGSEIVLTQSPATLSLSPGERATLTCSATSSVSYIHWYQQRPGQSPRLLIYSTSNLASGIPARFSGSGSGSDYTLTISSLEPEDFAVYYCQQRSSSPFTFGSGTKVEIKTTTPAPRPPTPAPTIASQPLSLRPEACRPAAGGAVHTRGLDFACDIYIWAPLAGTCGVLLLSLVITLYCRVKFSRSADAPAYKQGQNQLYNELNLGRREEYDVLDKRRGRDPEMGGKPRRKNPQEGLYNELQKDKMAEAYSEIGMKGERRRGKGHDGLYQGLSTATKDTYDALHMQALPPR

SEQ ID NO: 207180 - protein, 464 aa, Artificial Sequence
  Description of Artificial Sequence: Synthetic Chimeric Antigen Receptor
MALPVTALLLPLALLLHAARPGSQVQLQQSGPGLVTPSQTLSLTCAISGDSVSSNSATWNWIRQSPSRGLEWLGRTYYRSKWYNDYAVSVKSRMSINPDTSKNQFSLQLNSVTPEDTAVYYCARGMMTYYYGMDVWGQGTTVTVSSGILGSGGGGSGGGGSGGGGSQPVLTQSSSLSASPGASASLTCTLRSGINVGPYRIYWYQQKPGSPPQYLLNYKSDSDKQQGSGVPSRFSGSKDASANAGVLLISGLRSEDEADYYCMIWHSSAAVFGGGTQLTVLSASTTTPAPRPPTPAPTIASRPLSLRPEACRPAAGGAVHTRGLDFACDIYIWAPLAGTCGVLLLSLVITLYCRVKFSRSADAPAYQQGQNQLYNELNLGRREEYDVLDKRRGRDPEMGGKPRRKNPQEGLYNELQKDKMAEAYSEIGMKGERRGKGHDGLYQGLSTARKDTYDALHMQALPPT

SEQ ID NO: 207181 - protein, 487 aa, Artificial Sequence
  Description of Artificial Sequence: Synthetic Chimeric Antigen Receptor
MVLLVTSLLLCELPHPAFLLIPDIQQVQLQQSGPELEKPGASVKISCKASGYSFTGYTMNWVKQSHGKSLEWIGLITPYNGASSYNQKFRGKATLTVDKSSSTAYMDLLSLTSEDSAVYFCARGGYDGRGFDYWGQGTTVTVSSGGGGSGGGGSSGGGSDIELTQSPAIMSASPGEKVTMTCSASSSVSYMHWYQQKSGTSPKRWIYDTSKLASGVPGRFSGSGSGNSYSLTISSVEAEDDATYYCQQWSKHPLTFGAGTKLEIKAAAIEVMYPPPYLDNEKSNGTIIHVKGKHLCPSPLFPGPSKPFWVLVVVGGVLACYSLLVTVAFIIFWVRSKRSRLLHSDYMNMTPRRPGPTRKHYQPYAPPRDFAAYRSRVKFSRSADAPAYQQGQNQLYNELNLGRREEYDVLDKRRGRDPEMGGKPRRKNPQEGLYNELQKDKMAEAYSEIGMKGERRRGKGHDGLYQGLSTATKDTYDALHMQALPPR

SEQ ID NO: 207182 - protein, 490 aa, Artificial Sequence
  Description of Artificial Sequence: Synthetic Chimeric Antigen Receptor
MVLLVTSLLLCELPHPAFLLIPDIQAQVQLVQSGAEVKRPGASVQVSCRASGYSINTYYMQWVRQAPGAGLEWMGVINPSGVTSYAQKFQGRVTLTNDTSTNTVYMQLNSLTSADTAVYYCARWALWGDFGMDVWGKGTLVTVSSGGGGSGGGGSGGGGSDIQMTQSPSTLSASIGDRVTITCRASEGIYHWLAWYQQKPGKAPKLLIYKASSLASGAPSRFSGSGSGTDFTLTISSLQPDDFATYYCQQYSNYPLTFGGGTKLEIKRAAAIEVMYPPPYLDNEKSNGTIIHVKGKHLCPSPLFPGPSKPFWVLVVVGGVLACYSLLVTVAFIIFWVRSKRSRLLHSDYMNMTPRRPGPTRKHYQPYAPPRDFAAYRSRVKFSRSADAPAYQQGQNQLYNELNLGRREEYDVLDKRRGRDPEMGGKPRRKNPQEGLYNELQKDKMAEAYSEIGMKGERRRGKGHDGLYQGLSTATKDTYDALHMQALPPR

SEQ ID NO: 207183 - protein, 507 aa, Artificial Sequence
  Description of Artificial Sequence: Synthetic Chimeric Antigen Receptor
MALPVTALLLPLALLLHAARPGSQVQLQQSGPGLVTPSQTLSLTCAISGDSVSSNSATWNWIRQSPSRGLEWLGRTYYRSKWYNDYAVSVKSRMSINPDTSKNQFSLQLNSVTPEDTAVYYCARGMMTYYYGMDVWGQGTTVTVSSGILGSGGGGSGGGGSGGGGSQPVLTQSSSLSASPGASASLTCTLRSGINVGPYRIYWYQQKPGSPPQYLLNYKSDSDKQQGSGVPSRFSGSKDASANAGVLLISGLRSEDEADYYCMIWHSSAAVFGGGTQLTVLSASTTTPAPRPPTPAPTIASQPLSLRPEACRPAAGGAVHTRGLDFACDIYIWAPLAGTCGVLLLSLVITLYCKRGRKKLLYIFKQPFMRPVQTTQEEDGCSCRFPEEEEGGCELRVKFSRSADAPAYKQGQNQLYNELNLGRREEYDVLDKRRGRDPEMGGKPRRKNPQEGLYNELQKDKMAEAYSEIGMKGERRRGKGHDGLYQGLSTATKDTYDALHMQALPPR

SEQ ID NO: 207184 - protein, 511 aa, Artificial Sequence
  Description of Artificial Sequence: Synthetic Chimeric Antigen Receptor
MALPVTALLLPLALLLHAARPGSQVQLQQSGPGLVTPSQTLSLTCAISGDSVSSNSATWNWIRQSPSRGLEWLGRTYYRSKWYNDYAVSVKSRMSINPDTSKNQFSLQLNSVTPEDTAVYYCARGMMTYYYGMDVWGQGTTVTVSSGILGSGGGGSGGGGSGGGGSQPVLTQSSSLSASPGASASLTCTLRSGINVGPYRIYWYQQKPGSPPQYLLNYKSDSDKQQGSGVPSRFSGSKDASANAGVLLISGLRSEDEADYYCMIWHSSAAVFGGGTQLTVLSASTTTPAPRPPTPAPTIASQPLSLRPEACRPAAGGAVHTRGLDFACDFWVLVVVGGVLACYSLLVTVAFIIFWVRSKRSRLLHSDYMNMTPRRPGPTRKHYQPYAPPRDFAAYRSIDRVKFSRSADAPAYQQGQNQLYNELNLGRREEYDVLDKRRGRDPEMGGKPRRKNPQEGLYNELQKDKMAEAYSEIGMKGERRRGKGHDGLYQGLSTATKDTYDALHMQALPPR

SEQ ID NO: 207185 - protein, 551 aa, Artificial Sequence
  Description of Artificial Sequence: Synthetic Chimeric Antigen Receptor
MVLLVTSLLLCELPHPAFLLIPDIQQVQLQQSGPELEKPGASVKISCKASGYSFTGYTMNWVKQSHGKSLEWIGLITPYNGASSYNQKFRGKATLTVDKSSSTAYMDLLSLTSEDSAVYFCARGGYDGRGFDYWGQGTTVTVSSGGGGSGGGGSGGGGSDIELTQSPAIMSASPGEKVTMTCSASSSVSYMHWYQQKSGTSPKRWIYDTSKLASGVPGRFSGSGSGNSYSLTISSVEAEDDATYYCQQWSGYPLTFGAGTKLEIKAAAFVPVFLPAKPTTTPAPRPPTPAPTIASQPLSLRPEACRPAAGGAVHTRGLDFACDIYIWAPLAGTCGVLLLSLVITLYCNHRNRSKRSRLLHSDYMNMTPRRPGPTRKHYQPYAPPRDFAAYRSRFSVVKRGRKKLLYIFKQPFMRPVQTTQEEDGCSCRFPEEEEGGCELRVKFSRSADAPAYQQGQNQLYNELNLGRREEYDVLDKRRGRDPEMGGKPRRKNPQEGLYNELQKDKMAEAYSEIGMKGERRRGKGHDGLYQGLSTATKDTYDALHMQALPPR

SEQ ID NO: 207186 - protein, 551 aa, Artificial Sequence
  Description of Artificial Sequence: Synthetic Chimeric Antigen Receptor
MVLLVTSLLLCELPHPAFLLIPDIQQVQLQQSGPELEKPGASVKISCKASGYSFTGYTMNWVKQSHGKSLEWIGLITPYNGASSYNQKFRGKATLTVDKSSSTAYMDLLSLTSEDSAVYFCARGGYDGRGFDYWGQGTTVTVSSGGGGSGGGGSSGGGSDIELTQSPAIMSASPGEKVTMTCSASSSVSYMHWYQQKSGTSPKRWIYDTSKLASGVPGRFSGSGSGNSYSLTISSVEAEDDATYYCQQWSKHPLTFGAGTKLEIKAAAFVPVFLPAKPTTTPAPRPPTPAPTIASQPLSLRPEACRPAAGGAVHTRGLDFACDIYIWAPLAGTCGVLLLSLVITLYCNHRNRSKRSRLLHSDYMNMTPRRPGPTRKHYQPYAPPRDFAAYRSRFSVVKRGRKKLLYIFKQPFMRPVQTTQEEDGCSCRFPEEEEGGCELRVKFSRSADAPAYQQGQNQLYNELNLGRREEYDVLDKRRGRDPEMGGKPRRKNPQEGLYNELQKDKMAEAYSEIGMKGERRRGKGHDGLYQGLSTATKDTYDALHMQALPPR

SEQ ID NO: 207187 - protein, 554 aa, Artificial Sequence
  Description of Artificial Sequence: Synthetic Chimeric Antigen Receptor
MVLLVTSLLLCELPHPAFLLIPDIQAQVQLVQSGAEVKRPGASVQVSCRASGYSINTYYMQWVRQAPGAGLEWMGVINPSGVTSYAQKFQGRVTLTNDTSTNTVYMQLNSLTSADTAVYYCARWALWGDFGMDVWGKGTLVTVSSGGGGSGGGGSGGGGSDIQMTQSPSTLSASIGDRVTITCRASEGIYHWLAWYQQKPGKAPKLLIYKASSLASGAPSRFSGSGSGTDFTLTISSLQPDDFATYYCQQYSNYPLTFGGGTKLEIKRAAAFVPVFLPAKPTTTPAPRPPTPAPTIASQPLSLRPEACRPAAGGAVHTRGLDFACDIYIWAPLAGTCGVLLLSLVITLYCNHRNRSKRSRLLHSDYMNMTPRRPGPTRKHYQPYAPPRDFAAYRSRFSVVKRGRKKLLYIFKQPFMRPVQTTQEEDGCSCRFPEEEEGGCELRVKFSRSADAPAYQQGQNQLYNELNLGRREEYDVLDKRRGRDPEMGGKPRRKNPQEGLYNELQKDKMAEAYSEIGMKGERRRGKGHDGLYQGLSTATKDTYDALHMQALPPR

SEQ ID NO: 207188 - protein, 738 aa, Artificial Sequence
  Description of Artificial Sequence: Synthetic Chimeric Antigen Receptor
MALPVTALLLPLALLLHAARPEVQLQQSGGERATPGASVKMSCKTSGYTFTNYWMHWVKQRPGQGLEWIGYINPSSGYTQYNQKFKDKATLTADKSSSTAYIQLSSLTSEDSAVYYCSTYYGDYLFPYWGQGTLVTVSAGGGGSGGGGSGGGGSDVLMTQTPLSLPVSLGDQASISCRSSQDIVYGNGNTYLEWYLQKPGQSPKLLIYKVSNRFSGVPDRFSGSGSGTDFTLKISRVEAEDLGVYYCFQGSHVPYTFGGGTKLEIKRAAAIEVEQKLISEEDLLDNEKSNGTIIHVKGKHLCPSPLFPGPSKPFWVLVVVGGVLACYSLLVTVAFIIFWVRSKRSRLLHSDYMNMTPRRPGPTRKHYQPYAPPRDFAAYRSRVKFSRSADAPAYQQGQNQLYNELNLGRREEYDVLDKRRGRDPEMGGKPRRKNPQEGLYNELQKDKMAEAYSEIGMKGERRRGKGHDGLYQGLSTATKDTYDALHMQALPPRARGAAAGAGGAGRMVSELIKENMHMKLYMEGTVNNHHFKCTSEGEGKPYEGTQTMRIKAVEGGPLPFAFDILATSFMYGSKTFINHTQGIPDFFKQSFPEGFTWERVTTYEDGGVLTATQDTSLQDGCLIYNVKIRGVNFPSNGPVMQKKTLGWEASTETLYPADGGLEGRADMALKLVGGGHLICNLKTTYRSKKPAKNLKMPGVYYVDRRLERIKEADKETYVEQHEVAVARYCDLPSKLGHR

SEQ ID NO: 207189 - protein, 451 aa, Artificial Sequence
  Description of Artificial Sequence: Synthetic Chimeric Antigen Receptor
MALPVTALLLPLALLLHAARPEVQLVESGGGLVKPGGSLRLSCAASGFTFSGYAMSWVRQAPGKGLEWVSTISSGGTYIYYPDSVKGRFTISRDNAKNSLYLQMNSLRAEDTAVYYCARLGGDNYYEYFDVWGKGTTVTVSSGGGGSGGGGSGGGGSDIVLTQSPASLAVSPGQRATITCRASKSVSTSGYSYMHWYQQKPGQPPKLLIYLASNLESGVPARFSGSGSGTDFTLTINPVEANDTANYYCQHSRELPFTFGGGTKVEIKRTTTTPAPRPPTPAPTIASQPLSLRPEACRPAAGGAVHTRGLDFACDIYIWAPLAGTCGVLLLSLVITLYCRVKFSRSADAPAYKQGQNQLYNELNLGRREEYDVLDKRRGRDPEMGGKPRRKNPQEGLYNELQKDKMAEAYSEIGMKGERRRGKGHDGLYQGLSTATKDTYDALHMQALPPR

SEQ ID NO: 207190 - protein, 482 aa, Artificial Sequence
  Description of Artificial Sequence: Synthetic Chimeric Antigen Receptor
MALPVTALLLPLALLLHAARPEVQLVESGGGLVKPGGSLRLSCAASGFTFSRYGMSWVRQAPGKRLEWVSTISGGGTYIYYPDSVKGRFTISRDNAKNTLYLQMNSLRAEDTAVYYCTRDNYGRNYDYGMDYWGQGTLVTVSSGGGGSGGGGSGGGGSEIVLTQSPATLSLSPGERATLTCSATSSVSYIHWYQQRPGQSPRLLIYSTSNLASGIPARFSGSGSGSDYTLTISSLEPEDFAVYYCQQRSSSPFTFGSGTKVEIKTTTPAPRPPTPAPTIASQPLSLRPEACRPAAGGAVHTRGLDFACDIYIWAPLAGTCGVLLLSLVITLYCRRDQRLPPDAHKPPGGGSFRTPIQEEQADAHSTLAKIRVKFSRSADAPAYKQGQNQLYNELNLGRREEYDVLDKRRGRDPEMGGKPRRKNPQEGLYNELQKDKMAEAYSEIGMKGERRRGKGHDGLYQGLSTATKDTYDALHMQALPPR

SEQ ID NO: 207191 - protein, 486 aa, Artificial Sequence
  Description of Artificial Sequence: Synthetic Chimeric Antigen Receptor
MALPVTALLLPLALLLHAARPEVQLVESGGGLVKPGGSLRLSCAASGFTFSRYGMSWVRQAPGKRLEWVSTISGGGTYIYYPDSVKGRFTISRDNAKNTLYLQMNSLRAEDTAVYYCTRDNYGRNYDYGMDYWGQGTLVTVSSGGGGSGGGGSGGGGSEIVLTQSPATLSLSPGERATLTCSATSSVSYIHWYQQRPGQSPRLLIYSTSNLASGIPARFSGSGSGSDYTLTISSLEPEDFAVYYCQQRSSSPFTFGSGTKVEIKTTTPAPRPPTPAPTIASQPLSLRPEACRPAAGGAVHTRGLDFACDIYIWAPLAGTCGVLLLSLVITLYCRSKRSRLLHSDYMNMTPRRPGPTRKHYQPYAPPRDFAAYRSRVKFSRSADAPAYKQGQNQLYNELNLGRREEYDVLDKRRGRDPEMGGKPRRKNPQEGLYNELQKDKMAEAYSEIGMKGERRRGKGHDGLYQGLSTATKDTYDALHMQALPPR

SEQ ID NO: 207192 - protein, 487 aa, Artificial Sequence
  Description of Artificial Sequence: Synthetic Chimeric Antigen Receptor
MALPVTALLLPLALLLHAARPEVQLVESGGGLVKPGGSLRLSCAASGFTFSRYGMSWVRQAPGKRLEWVSTISGGGTYIYYPDSVKGRFTISRDNAKNTLYLQMNSLRAEDTAVYYCTRDNYGRNYDYGMDYWGQGTLVTVSSGGGGSGGGGSGGGGSEIVLTQSPATLSLSPGERATLTCSATSSVSYIHWYQQRPGQSPRLLIYSTSNLASGIPARFSGSGSGSDYTLTISSLEPEDFAVYYCQQRSSSPFTFGSGTKVEIKTTTPAPRPPTPAPTIASQPLSLRPEACRPAAGGAVHTRGLDFACDIYIWAPLAGTCGVLLLSLVITLYCKRGRKKLLYIFKQPFMRPVQTTQEEDGCSCRFPEEEEGGCELRVKFSRSADAPAYKQGQNQLYNELNLGRREEYDVLDKRRGRDPEMGGKPRRKNPQEGLYNELQKDKMAEAYSEIGMKGERRRGKGHDGLYQGLSTATKDTYDALHMQALPPR

SEQ ID NO: 207193 - protein, 488 aa, Artificial Sequence
  Description of Artificial Sequence: Synthetic Chimeric Antigen Receptor
MALPVTALLLPLALLLHAARPEVQLVESGGGLVKPGGSLRLSCAASGFTFSGYAMSWVRQAPGKGLEWVSTISSGGTYIYYPDSVKGRFTISRDNAKNSLYLQMNSLRAEDTAVYYCARLGGDNYYEYFDVWGKGTTVTVSSGGGGSGGGGSGGGGSDIVLTQSPASLAVSPGQRATITCRASKSVSTSGYSYMHWYQQKPGQPPKLLIYLASNLESGVPARFSGSGSGTDFTLTINPVEANDTANYYCQHSRELPFTFGGGTKVEIKRTTTTPAPRPPTPAPTIASQPLSLRPEACRPAAGGAVHTRGLDFACDIYIWAPLAGTCGVLLLSLVITLYCRRDQRLPPDAHKPPGGGSFRTPIQEEQADAHSTLAKIRVKFSRSADAPAYKQGQNQLYNELNLGRREEYDVLDKRRGRDPEMGGKPRRKNPQEGLYNELQKDKMAEAYSEIGMKGERRRGKGHDGLYQGLSTATKDTYDALHMQALPPR

SEQ ID NO: 207194 - protein, 492 aa, Artificial Sequence
  Description of Artificial Sequence: Synthetic Chimeric Antigen Receptor
MALPVTALLLPLALLLHAARPEVQLVESGGGLVKPGGSLRLSCAASGFTFSGYAMSWVRQAPGKGLEWVSTISSGGTYIYYPDSVKGRFTISRDNAKNSLYLQMNSLRAEDTAVYYCARLGGDNYYEYFDVWGKGTTVTVSSGGGGSGGGGSGGGGSDIVLTQSPASLAVSPGQRATITCRASKSVSTSGYSYMHWYQQKPGQPPKLLIYLASNLESGVPARFSGSGSGTDFTLTINPVEANDTANYYCQHSRELPFTFGGGTKVEIKRTTTTPAPRPPTPAPTIASQPLSLRPEACRPAAGGAVHTRGLDFACDIYIWAPLAGTCGVLLLSLVITLYCRSKRSRLLHSDYMNMTPRRPGPTRKHYQPYAPPRDFAAYRSRVKFSRSADAPAYKQGQNQLYNELNLGRREEYDVLDKRRGRDPEMGGKPRRKNPQEGLYNELQKDKMAEAYSEIGMKGERRRGKGHDGLYQGLSTATKDTYDALHMQALPPR

SEQ ID NO: 207195 - protein, 493 aa, Artificial Sequence
  Description of Artificial Sequence: Synthetic Chimeric Antigen Receptor
MALPVTALLLPLALLLHAARPEVQLVESGGGLVKPGGSLRLSCAASGFTFSGYAMSWVRQAPGKGLEWVSTISSGGTYIYYPDSVKGRFTISRDNAKNSLYLQMNSLRAEDTAVYYCARLGGDNYYEYFDVWGKGTTVTVSSGGGGSGGGGSGGGGSDIVLTQSPASLAVSPGQRATITCRASKSVSTSGYSYMHWYQQKPGQPPKLLIYLASNLESGVPARFSGSGSGTDFTLTINPVEANDTANYYCQHSRELPFTFGGGTKVEIKRTTTTPAPRPPTPAPTIASQPLSLRPEACRPAAGGAVHTRGLDFACDIYIWAPLAGTCGVLLLSLVITLYCKRGRKKLLYIFKQPFMRPVQTTQEEDGCSCRFPEEEEGGCELRVKFSRSADAPAYKQGQNQLYNELNLGRREEYDVLDKRRGRDPEMGGKPRRKNPQEGLYNELQKDKMAEAYSEIGMKGERRRGKGHDGLYQGLSTATKDTYDALHMQALPPR

SEQ ID NO: 207196 - protein, 513 aa, Artificial Sequence
  Description of Artificial Sequence: Synthetic Chimeric Antigen Receptor
EVQLVESGGGLVKPGGSLRLSCAASGFTFSGYAMSWVRQAPGKGLEWVSTISSGGTYIYYPDSVKGRFTISRDNAKNSLYLQMNSLRAEDTAVYYCARLGGDNYYEYFDVWGKGTTVTVSSGGGGSGGGGSGGGGSDIVLTQSPASLAVSPGQRATITCRASKSVSTSGYSYMHWYQQKPGQPPKLLIYLASNLESGVPARFSGSGSGTDFTLTINPVEANDTANYYCQHSRELPFTFGGGTKVEIKRTTTTPAPRPPTPAPTIASQPLSLRPEACRPAAGGAVHTRGLDFACDIYIWAPLAGTCGVLLLSLVITLYCRSKRSRLLHSDYMNMTPRRPGPTRKHYQPYAPPRDFAAYRSKRGRKKLLYIFKQPFMRPVQTTQEEDGCSCRFPEEEEGGCELRVKFSRSADAPAYKQGQNQLYNELNLGRREEYDVLDKRRGRDPEMGGKPRRKNPQEGLYNELQKDKMAEAYSEIGMKGERRRGKGHDGLYQGLSTATKDTYDALHMQALPPR

SEQ ID NO: 207197 - protein, 523 aa, Artificial Sequence
  Description of Artificial Sequence: Synthetic Chimeric Antigen Receptor
MALPVTALLLPLALLLHAARPEVQLVESGGGLVKPGGSLRLSCAASGFTFSRYGMSWVRQAPGKRLEWVSTISGGGTYIYYPDSVKGRFTISRDNAKNTLYLQMNSLRAEDTAVYYCTRDNYGRNYDYGMDYWGQGTLVTVSSGGGGSGGGGSGGGGSEIVLTQSPATLSLSPGERATLTCSATSSVSYIHWYQQRPGQSPRLLIYSTSNLASGIPARFSGSGSGSDYTLTISSLEPEDFAVYYCQQRSSSPFTFGSGTKVEIKTTTPAPRPPTPAPTIASQPLSLRPEACRPAAGGAVHTRGLDFACDIYIWAPLAGTCGVLLLSLVITLYCRSKRSRLLHSDYMNMTPRRPGPTRKHYQPYAPPRDFAAYRSRRDQRLPPDAHKPPGGGSFRTPIQEEQADAHSTLAKIRVKFSRSADAPAYKQGQNQLYNELNLGRREEYDVLDKRRGRDPEMGGKPRRKNPQEGLYNELQKDKMAEAYSEIGMKGERRRGKGHDGLYQGLSTATKDTYDALHMQALPPR

SEQ ID NO: 207198 - protein, 528 aa, Artificial Sequence
  Description of Artificial Sequence: Synthetic Chimeric Antigen Receptor
MALPVTALLLPLALLLHAARPEVQLVESGGGLVKPGGSLRLSCAASGFTFSRYGMSWVRQAPGKRLEWVSTISGGGTYIYYPDSVKGRFTISRDNAKNTLYLQMNSLRAEDTAVYYCTRDNYGRNYDYGMDYWGQGTLVTVSSGGGGSGGGGSGGGGSEIVLTQSPATLSLSPGERATLTCSATSSVSYIHWYQQRPGQSPRLLIYSTSNLASGIPARFSGSGSGSDYTLTISSLEPEDFAVYYCQQRSSSPFTFGSGTKVEIKTTTPAPRPPTPAPTIASQPLSLRPEACRPAAGGAVHTRGLDFACDIYIWAPLAGTCGVLLLSLVITLYCRSKRSRLLHSDYMNMTPRRPGPTRKHYQPYAPPRDFAAYRSKRGRKKLLYIFKQPFMRPVQTTQEEDGCSCRFPEEEEGGCELRVKFSRSADAPAYKQGQNQLYNELNLGRREEYDVLDKRRGRDPEMGGKPRRKNPQEGLYNELQKDKMAEAYSEIGMKGERRRGKGHDGLYQGLSTATKDTYDALHMQALPPR

SEQ ID NO: 207199 - protein, 529 aa, Artificial Sequence
  Description of Artificial Sequence: Synthetic Chimeric Antigen Receptor
MALPVTALLLPLALLLHAARPEVQLVESGGGLVKPGGSLRLSCAASGFTFSGYAMSWVRQAPGKGLEWVSTISSGGTYIYYPDSVKGRFTISRDNAKNSLYLQMNSLRAEDTAVYYCARLGGDNYYEYFDVWGKGTTVTVSSGGGGSGGGGSGGGGSDIVLTQSPASLAVSPGQRATITCRASKSVSTSGYSYMHWYQQKPGQPPKLLIYLASNLESGVPARFSGSGSGTDFTLTINPVEANDTANYYCQHSRELPFTFGGGTKVEIKRTTTTPAPRPPTPAPTIASQPLSLRPEACRPAAGGAVHTRGLDFACDIYIWAPLAGTCGVLLLSLVITLYCRSKRSRLLHSDYMNMTPRRPGPTRKHYQPYAPPRDFAAYRSRRDQRLPPDAHKPPGGGSFRTPIQEEQADAHSTLAKIRVKFSRSADAPAYKQGQNQLYNELNLGRREEYDVLDKRRGRDPEMGGKPRRKNPQEGLYNELQKDKMAEAYSEIGMKGERRRGKGHDGLYQGLSTATKDTYDALHMQALPPR

SEQ ID NO: 207200 - protein, 535 aa, Artificial Sequence
  Description of Artificial Sequence: Synthetic Chimeric Antigen Receptor
MALPVTALLLPLALLLHAARPEVQLQQSGGERATPGASVKMSCKTSGYTFTNYWMHWVKQRPGQGLEWIGYINPSSGYTQYNQKFKDKATLTADKSSSTAYIQLSSLTSEDSAVYYCSTYYGDYLFPYWGQGTLVTVSAGGGGSGGGGSGGGGSDVLMTQTPLSLPVSLGDQASISCRSSQDIVYGNGNTYLEWYLQKPGQSPKLLIYKVSNRFSGVPDRFSGSGSGTDFTLKISRVEAEDLGVYYCFQGSHVPYTFGGGTKLEIKRAAAIEVEQKLISEEDLLDNEKSNGTIIHVKGKHLCPSPLFPGPSKPFWVLVVVGGVLACYSLLVTVAFIIFWVRSKRSRLLHSDYMNMTPRRPGPTRKHYQPYAPPRDFAAYRSKRGRKKLLYIFKQPFMRPVQTTQEEDGCSCRFPEEEEGGCELRVKFSRSADAPAYQQGQNQLYNELNLGRREEYDVLDKRRGRDPEMGGKPRRKNPQEGLYNELQKDKMAEAYSEIGMKGERRRGKGHDGLYQGLSTATKDTYDALHMQALPPR

SEQ ID NO: 207201 - protein, 555 aa, Artificial Sequence
  Description of Artificial Sequence: Synthetic Chimeric Antigen Receptor
MALPVTALLLPLALLLHAARPEVQLQQSGGERATPGASVKMSCKTSGYTFTNYWMHWVKQRPGQGLEWIGYINPSSGYTQYNQKFKDKATLTADKSSSTAYIQLSSLTSEDSAVYYCSTYYGDYLFPYWGQGTLVTVSAGGGGSGGGGSGGGGSDVLMTQTPLSLPVSLGDQASISCRSSQDIVYGNGNTYLEWYLQKPGQSPKLLIYKVSNRFSGVPDRFSGSGSGTDFTLKISRVEAEDLGVYYCFQGSHVPYTFGGGTKLEIKRAAAIEVEQKLISEEDLLDNEKSNGTIIHVKGKHLCPSPLFPGPSKPFWVLVVVGGVLACYSLLVTVAFIIFWVRSKRSRLLHSDYMNMTPRRPGPTRKHYQPYAPPRDFAAYRSRDQRLPPDAHKPPGECLMALPHCSWRVRPTHQSLLFSSPGGGSFRTPIQEEQADAHSTLAKIRVKFSRSADAPAYQQGQNQLYNELNLGRREEYDVLDKRRGRDPEMGGKPRRKNPQEGLYNELQKDKMAEAYSEIGMKGERRRGKGHDGLYQGLSTATKDTYDALHMQALPPR

SEQ ID NO: 207202 - protein, 1397 aa, Artificial Sequence; identical to SEQ ID NO: 5221
  Description of Artificial Sequence: Synthetic Chimeric Antigen Receptor

SEQ ID NO: 207203 - protein, 463 aa, Artificial Sequence
  Description of Artificial Sequence: Synthetic Chimeric Antigen Receptor
VQLQESGPDLVKPSQSLSLTCTVTGYSITSGYSWHWIRQFPGNKLEWMGYIHYSGDTDYNPSLKSRFSITRDTSKNQFFLQLNSVTTEDTATYYCATPGGFVYWGQGTLVTVSAGGGGSGGGGSGGGGSDVVMTQTPLTLSVTIGQPASISCKSSQSLLDSDGKTYLHWLLQRPGQSPKRLIFLVSKLDSGVPDRFTGSGSGTDFTLKISRVEAEDLGVYYCWQGTHFPQTFGGGTKLEIKAAAIEVMYPPPYLDNEKSNGTIIHVKGKHLCPSPLFPGPSKPFWVLVVVGGVLACYSLLVTVAFIIFWVRSKRSRLLHSDYMNMTPRRPGPTRKHYQPYAPPRDFAAYRSRVKFSRSADAPAYQQGQNQLYNELNLGRREEYDVLDKRRGRDPEMGGKPRRKNPQEGLYNELQKDKMAEAYSEIGMKGERRRGKGHDGLYQGLSTATKDTYDALHMQALPPR

SEQ ID NO: 207204 - protein, 394 aa, Artificial Sequence
  Description of Artificial Sequence: Synthetic Chimeric Antigen Receptor
MALPVTALLLPLALLLHAARPPGWFLDSPDRPWNPPTFSPALLVVTEGDNATFTCSFSNTSESFVLNWYRMSPSNQTDKLAAFPEDRSQPGQDCRFRVTQLPNGRDFHMSVVRARRNDSGTYLCGAISLAPKAQIKESLRAELRVTERRAEVPTAHPSPSPRPAGQFQTLVTTTPAPRPPTPAPTIASQPLSLRPEACRPAAGGAVHTRGLDFACDIYIWAPLAGTCGVLLLSLVITLYCKRGRKKLLYIFKQPFMRPVQTTQEEDGCSCRFPEEEEGGCELRVKFSRSADAPAYKQGQNQLYNELNLGRREEYDVLDKRRGRDPEMGGKPRRKNPQEGLYNELQKDKMAEAYSEIGMKGERRRGKGHDGLYQGLSTATKDTYDALHMQALPPR

SEQ ID NO: 207205 - protein, 453 aa, Artificial Sequence
  Description of Artificial Sequence: Synthetic Chimeric Antigen Receptor
MALPVTALLLPLALLLHAARPEVQLLESGGGLVQPGGSLRLSCAASGFTFSSYAMNWVRQAPGKGLEWVSAISDSGGSTYYADSVKGRFTISRDNSKNTLYLQMNSLRAEDTAVYYCARYWPMDIWGQGTLVTVSSGGGGSGGGGSGGGGSEIVLTQSPGTLSLSPGERATLSCRASQSVSSSYLAWYQQKPGQAPRLLMYDASIRATGIPDRFSGSGSGTDFTLTISRLEPEDFAVYYCQQYGSWPLTFGQGTKVEIKGLAVSTISSFFPPGYQIYIWAPLAGTCGVLLLSLVITLYCKRGRKKLLYIFKQPFMRPVQTTQEEDGCSCRFPEEEEGGCELRVKFSRSADAPAYQQGQNQLYNELNLGRREEYDVLDKRRGRDPEMGGKPRRKNPQEGLYNELQKDKMAEAYSEIGMKGERRRGKGHDGLYQGLSTATKDTYDALHMQALPPR

SEQ ID NO: 207206 - protein, 486 aa, Artificial Sequence
  Description of Artificial Sequence: Synthetic Chimeric Antigen Receptor
VQLQESGPDLVKPSQSLSLTCTVTGYSITSGYSWHWIRQFPGNKLEWMGYIHYSGDTDYNPSLKSRFSITRDTSKNQFFLQLNSVTTEDTATYYCATPGGFVYWGQGTLVTVSAGGGGSGGGGSGGGGSDVVMTQTPLTLSVTIGQPASISCKSSQSLLDSDGKTYLHWLLQRPGQSPKRLIFLVSKLDSGVPDRFTGSGSGTDFTLKISRVEAEDLGVYYCWQGTHFPQTFGGGTKLEIKAAAFVPVFLPAKPTTTPAPRPPTPAPTIASQPLSLRPEACRPAAGGAVHTRGLDFACDIYIWAPLAGTCGVLLLSLVITLYCNHRNRFSVVKRGRKKLLYIFKQPFMRPVQTTQEEDGCSCRFPEEEEGGCELRVKFSRSADAPAYQQGQNQLYNELNLGRREEYDVLDKRRGRDPEMGGKPRRKNPQEGLYNELQKDKMAEAYSEIGMKGERRRGKGHDGLYQGLSTATKDTYDALHMQALPPR

SEQ ID NO: 207207 - protein, 489 aa, Artificial Sequence
  Description of Artificial Sequence: Synthetic Chimeric Antigen Receptor
MALPVTALLLPLALLLHAARPAIRMTQSPSSLSASVGDRVTITCQASQDISNYLNWYQQKPGKAPKLLIYDASNLETGVPSRFSGSGSGTDFTFTISSLQPEDIATYYCQQYDNLPLTFGGGTKVEIKRGGGGSGGGGSGGGGSEVQLVESGGGLVKPGGSLRLSCAASGFTFSDYYMSWIRQAPGKGLEWVSYISDSTNTIYYADSVKGRFTVSRDNPKNSLYLQMISLRAEDTAVYYCARAVGAGEGFDHWGQGTLVTVSSAAATTTPAPRPPTPAPTIASQPLSLRPEACRPAAGGAVHTRGLDFACDIYIWAPLAGTCGVLLLSLVITLYCKRGRKKLLYIFKQPFMRPVQTTQEEDGCSCRFPEEEEGGCELRVKFSRSADAPAYQQGQNQLYNELNLGRREEYDVLDKRRGRDPEMGGKPRRKNPQEGLYNELQKDKMAEAYSEIGMKGERRRGKGHDGLYQGLSTATKDTYDALHMQALPPR

SEQ ID NO: 207208 - protein, 527 aa, Artificial Sequence
  Description of Artificial Sequence: Synthetic Chimeric Antigen Receptor
VQLQESGPDLVKPSQSLSLTCTVTGYSITSGYSWHWIRQFPGNKLEWMGYIHYSGDTDYNPSLKSRFSITRDTSKNQFFLQLNSVTTEDTATYYCATPGGFVYWGQGTLVTVSAGGGGSGGGGSGGGGSDVVMTQTPLTLSVTIGQPASISCKSSQSLLDSDGKTYLHWLLQRPGQSPKRLIFLVSKLDSGVPDRFTGSGSGTDFTLKISRVEAEDLGVYYCWQGTHFPQTFGGGTKLEIKAAAFVPVFLPAKPTTTPAPRPPTPAPTIASQPLSLRPEACRPAAGGAVHTRGLDFACDIYIWAPLAGTCGVLLLSLVITLYCNHRNRSKRSRLLHSDYMNMTPRRPGPTRKHYQPYAPPRDFAAYRSRFSVVKRGRKKLLYIFKQPFMRPVQTTQEEDGCSCRFPEEEEGGCELRVKFSRSADAPAYQQGQNQLYNELNLGRREEYDVLDKRRGRDPEMGGKPRRKNPQEGLYNELQKDKMAEAYSEIGMKGERRRGKGHDGLYQGLSTATKDTYDALHMQALPPR

SEQ ID NO: 207209 - protein, 453 aa, Artificial Sequence
  Description of Artificial Sequence: Synthetic Chimeric Antigen Receptor
MALPVTALLLPLALLLHAARPEVQLLESGGGLVQPGGSLRLSCAASGFTFSSYAMNWVRQAPGKGLEWVSAILSSGGSTYYADSVKGRFTISRDNSKNTLYLQMNSLRAEDTAVYYCARYWPMDIWGQGTLVTVSSGGGGSGGGGSGGGGSEIVLTQSPGTLSLSPGERATLSCRGGQSVSSSYLAWYQQKPGQAPRLLMYDASIRATGIPDRFSGSGSGTDFTLTISRLEPEDFAVYYCQQYQSWPLTFGQGTKVEIKGLAVSTISSFFPPGYQIYIWAPLAGTCGVLLLSLVITLYCKRGRKKLLYIFKQPFMRPVQTTQEEDGCSCRFPEEEEGGCELRVKFSRSADAPAYQQGQNQLYNELNLGRREEYDVLDKRRGRDPEMGGKPRRKNPQEGLYNELQKDKMAEAYSEIGMKGERRRGKGHDGLYQGLSTATKDTYDALHMQALPPR

SEQ ID NO: 207210 - protein, 482 aa, Artificial Sequence
  Description of Artificial Sequence: Synthetic Chimeric Antigen Receptor
MALPVTALLLPLALLLHAARPEVQLLESGGGLVQPGGSLRLSCAASGFTFSSYAMNWVRQAPGKGLEWVSAISDSGGSTYYADSVKGRFTISRDNSKNTLYLQMNSLRAEDTAVYYCARYWPMDIWGQGTLVTVSSGGGGSGGGGSGGGGSEIVLTQSPGTLSLSPGERATLSCRASQSVSSSYLAWYQQKPGQAPRLLMYDASIRATGIPDRFSGSGSGTDFTLTISRLEPEDFAVYYCQQYGSWPLTFGQGTKVEIKTTTPAPRPPTPAPTIASQPLSLRPEACRPAAGGAVHTRGLDFACDIYIWAPLAGTCGVLLLSLVITLYCKRGRKKLLYIFKQPFMRPVQTTQEEDGCSCRFPEEEEGGCELRVKFSRSADAPAYQQGQNQLYNELNLGRREEYDVLDKRRGRDPEMGGKPRRKNPQEGLYNELQKDKMAEAYSEIGMKGERRRGKGHDGLYQGLSTATKDTYDALHMQALPPR

SEQ ID NO: 207211 - protein, 668 aa, Artificial Sequence
  Description of Artificial Sequence: Synthetic Chimeric Antigen Receptor
MALPVTALLLPLALLLHAARPEVQLLESGGGLVQPGGSLRLSCAASGFTFSSYAMNWVRQAPGKGLEWVSAISDSGGSTYYADSVKGRFTISRDNSKNTLYLQMNSLRAEDTAVYYCARYWPMDIWGQGTLVTVSSGGGGSGGGGSGGGGSEIVLTQSPGTLSLSPGERATLSCRASQSVSSSYLAWYQQKPGQAPRLLMYDASIRATGIPDRFSGSGSGTDFTLTISRLEPEDFAVYYCQQYGSWPLTFGQGTKVEIKEPKSPDKTHTCPPCPAPPVAGPSVFLFPPKPKDTLMIARTPEVTCVVVDVSHEDPEVKFNWYVDGVEVHNAKTKPREEQYNSTYRVVSVLTVLHQDWLNGKEYKCKVSNKALPAPIEKTISKAKGQPREPQVYTLPPSRDELTKNQVSLTCLVKGFYPSDIAVEWESNGQPENNYKTTPPVLDSDGSFFLYSKLTVDKSRWQQGNVFSCSVMHEALHNHYTQKSLSLSPGKIYIWAPLAGTCGVLLLSLVITLYCKRGRKKLLYIFKQPFMRPVQTTQEEDGCSCRFPEEEEGGCELRVKFSRSADAPAYQQGQNQLYNELNLGRREEYDVLDKRRGRDPEMGGKPRRKNPQEGLYNELQKDKMAEAYSEIGMKGERRRGKGHDGLYQGLSTATKDTYDALHMQALPPR

SEQ ID NO: 207212 - protein, 453 aa, Artificial Sequence
  Description of Artificial Sequence: Synthetic Chimeric Antigen Receptor
MALPVTALLLPLALLLHAARPEVQLLESGGGLVQPGGSLRLSCAASGFTFSSYAMNWVRQAPGKGLEWVSAISDFGGSTYYADSVKGRFTISRDNSKNTLYLQMNSLRAEDTAVYYCARYWPMDIWGQGTLVTVSSGGGGSGGGGSGGGGSEIVLTQSPGTLSLSPGERATLSCRASQSVSDIYLAWYQQKPGQAPRLLMYDASIRATGIPDRFSGSGSGTDFTLTISRLEPEDFAVYYCQQYQTWPLTFGQGTKVEIKGLAVSTISSFFPPGYQIYIWAPLAGTCGVLLLSLVITLYCKRGRKKLLYIFKQPFMRPVQTTQEEDGCSCRFPEEEEGGCELRVKFSRSADAPAYQQGQNQLYNELNLGRREEYDVLDKRRGRDPEMGGKPRRKNPQEGLYNELQKDKMAEAYSEIGMKGERRRGKGHDGLYQGLSTATKDTYDALHMQALPPR

SEQ ID NO: 207213 - protein, 482 aa, Artificial Sequence
  Description of Artificial Sequence: Synthetic Chimeric Antigen Receptor
MALPVTALLLPLALLLHAARPEVQLLESGGGLVQPGGSLRLSCAASGFTFSSYAMNWVRQAPGKGLEWVSAILSSGGSTYYADSVKGRFTISRDNSKNTLYLQMNSLRAEDTAVYYCARYWPMDIWGQGTLVTVSSGGGGSGGGGSGGGGSEIVLTQSPGTLSLSPGERATLSCRGGQSVSSSYLAWYQQKPGQAPRLLMYDASIRATGIPDRFSGSGSGTDFTLTISRLEPEDFAVYYCQQYQSWPLTFGQGTKVEIKTTTPAPRPPTPAPTIASQPLSLRPEACRPAAGGAVHTRGLDFACDIYIWAPLAGTCGVLLLSLVITLYCKRGRKKLLYIFKQPFMRPVQTTQEEDGCSCRFPEEEEGGCELRVKFSRSADAPAYQQGQNQLYNELNLGRREEYDVLDKRRGRDPEMGGKPRRKNPQEGLYNELQKDKMAEAYSEIGMKGERRRGKGHDGLYQGLSTATKDTYDALHMQALPPR

SEQ ID NO: 207214 - protein, 519 aa, Artificial Sequence
  Description of Artificial Sequence: Synthetic Chimeric Antigen Receptor
MALPVTALLLPLALLLHAARPEVQLLESGGGLVQPGGSLRLSCAASGFTFSSYAMNWVRQAPGKGLEWVSAILSSGGSTYYADSVKGRFTISRDNSKNTLYLQMNSLRAEDTAVYYCARYWPMDIWGQGTLVTVSSGGGGSGGGGSGGGGSEIVLTQSPGTLSLSPGERATLSCRGGQSVSSSYLAWYQQKPGQAPRLLMYDASIRATGIPDRFSGSGSGTDFTLTISRLEPEDFAVYYCQQYQSWPLTFGQGTKVEIKGSGGGGSCPYSNPSLCSGGGGSCPYSNPSLCSGGGGSTTTPAPRPPTPAPTIASQPLSLRPEACRPAAGGAVHTRGLDFACDIYIWAPLAGTCGVLLLSLVITLYCKRGRKKLLYIFKQPFMRPVQTTQEEDGCSCRFPEEEEGGCELRVKFSRSADAPAYQQGQNQLYNELNLGRREEYDVLDKRRGRDPEMGGKPRRKNPQEGLYNELQKDKMAEAYSEIGMKGERRRGKGHDGLYQGLSTATKDTYDALHMQALPPR

SEQ ID NO: 207215 - protein, 668 aa, Artificial Sequence
  Description of Artificial Sequence: Synthetic Chimeric Antigen Receptor
MALPVTALLLPLALLLHAARPEVQLLESGGGLVQPGGSLRLSCAASGFTFSSYAMNWVRQAPGKGLEWVSAILSSGGSTYYADSVKGRFTISRDNSKNTLYLQMNSLRAEDTAVYYCARYWPMDIWGQGTLVTVSSGGGGSGGGGSGGGGSEIVLTQSPGTLSLSPGERATLSCRGGQSVSSSYLAWYQQKPGQAPRLLMYDASIRATGIPDRFSGSGSGTDFTLTISRLEPEDFAVYYCQQYQSWPLTFGQGTKVEIKEPKSPDKTHTCPPCPAPPVAGPSVFLFPPKPKDTLMIARTPEVTCVVVDVSHEDPEVKFNWYVDGVEVHNAKTKPREEQYNSTYRVVSVLTVLHQDWLNGKEYKCKVSNKALPAPIEKTISKAKGQPREPQVYTLPPSRDELTKNQVSLTCLVKGFYPSDIAVEWESNGQPENNYKTTPPVLDSDGSFFLYSKLTVDKSRWQQGNVFSCSVMHEALHNHYTQKSLSLSPGKIYIWAPLAGTCGVLLLSLVITLYCKRGRKKLLYIFKQPFMRPVQTTQEEDGCSCRFPEEEEGGCELRVKFSRSADAPAYQQGQNQLYNELNLGRREEYDVLDKRRGRDPEMGGKPRRKNPQEGLYNELQKDKMAEAYSEIGMKGERRRGKGHDGLYQGLSTATKDTYDALHMQALPPR

SEQ ID NO: 207216 - protein, 453 aa, Artificial Sequence
  Description of Artificial Sequence: Synthetic Chimeric Antigen Receptor
MALPVTALLLPLALLLHAARPEVQLLESGGGLVQPGGSLRLSCAASGFTFGSYAMTWVRQAPGKGLEWVSAISGSGGNTFYADSVKGRFTISRDNSKNTLYLQMNSLRAEDTAVYYCARVSPIAAPMDYWGQGTLVTVSSGGGGSGGGGSGGGGSEIVLTQSPGTLSLSPGERATLSCRASQLGSFYLAWYQQKPGQAPRLLIYGASSRATGIPDRFSGSGSGTDFTLTISRLEPEDFAVYYCQHYNYPPSFTFGQGTKVEIKGLAVSTISSFFPPGYQIYIWAPLAGTCGVLLLSLVITLYCKRGRKKLLYIFKQPFMRPVQTTQEEDGCSCRFPEEEEGGCELRVKFSRSADAPAYQQGQNQLYNELNLGRREEYDVLDKRRGRDPEMGGKPRRKNPQEGLYNELQKDKMAEAYSEIGMKGERRRGKGHDGLYQGLSTATKDTYDALHMQA

SEQ ID NO: 207217 - protein, 482 aa, Artificial Sequence
  Description of Artificial Sequence: Synthetic Chimeric Antigen Receptor
MALPVTALLLPLALLLHAARPEVQLLESGGGLVQPGGSLRLSCAASGFTFSSYAMNWVRQAPGKGLEWVSAISDFGGSTYYADSVKGRFTISRDNSKNTLYLQMNSLRAEDTAVYYCARYWPMDIWGQGTLVTVSSGGGGSGGGGSGGGGSEIVLTQSPGTLSLSPGERATLSCRASQSVSDIYLAWYQQKPGQAPRLLMYDASIRATGIPDRFSGSGSGTDFTLTISRLEPEDFAVYYCQQYQTWPLTFGQGTKVEIKTTTPAPRPPTPAPTIASQPLSLRPEACRPAAGGAVHTRGLDFACDIYIWAPLAGTCGVLLLSLVITLYCKRGRKKLLYIFKQPFMRPVQTTQEEDGCSCRFPEEEEGGCELRVKFSRSADAPAYQQGQNQLYNELNLGRREEYDVLDKRRGRDPEMGGKPRRKNPQEGLYNELQKDKMAEAYSEIGMKGERRRGKGHDGLYQGLSTATKDTYDALHMQALPPR

SEQ ID NO: 207218 - protein, 668 aa, Artificial Sequence
  Description of Artificial Sequence: Synthetic Chimeric Antigen Receptor
MALPVTALLLPLALLLHAARPEVQLLESGGGLVQPGGSLRLSCAASGFTFSSYAMNWVRQAPGKGLEWVSAISDFGGSTYYADSVKGRFTISRDNSKNTLYLQMNSLRAEDTAVYYCARYWPMDIWGQGTLVTVSSGGGGSGGGGSGGGGSEIVLTQSPGTLSLSPGERATLSCRASQSVSDIYLAWYQQKPGQAPRLLMYDASIRATGIPDRFSGSGSGTDFTLTISRLEPEDFAVYYCQQYQTWPLTFGQGTKVEIKEPKSPDKTHTCPPCPAPPVAGPSVFLFPPKPKDTLMIARTPEVTCVVVDVSHEDPEVKFNWYVDGVEVHNAKTKPREEQYNSTYRVVSVLTVLHQDWLNGKEYKCKVSNKALPAPIEKTISKAKGQPREPQVYTLPPSRDELTKNQVSLTCLVKGFYPSDIAVEWESNGQPENNYKTTPPVLDSDGSFFLYSKLTVDKSRWQQGNVFSCSVMHEALHNHYTQKSLSLSPGKIYIWAPLAGTCGVLLLSLVITLYCKRGRKKLLYIFKQPFMRPVQTTQEEDGCSCRFPEEEEGGCELRVKFSRSADAPAYQQGQNQLYNELNLGRREEYDVLDKRRGRDPEMGGKPRRKNPQEGLYNELQKDKMAEAYSEIGMKGERRRGKGHDGLYQGLSTATKDTYDALHMQALPPR

SEQ ID NO: 207219 - protein, 453 aa, Artificial Sequence
  Description of Artificial Sequence: Synthetic Chimeric Antigen Receptor
MALPVTALLLPLALLLHAARPEVQLLESGGGLVQPGGSLRLSCAASGFTFGSYAMTWVRQAPGKGLEWVSAIDYSGGNTFYADSVKGRFTISRDNSKNTLYLQMNSLRAEDTAVYYCARVSPIASGMDYWGQGTLVTVSSGGGGSGGGGSGGGGSEIVLTQSPGTLSLSPGERATLSCRASQSVSSSYPSWYQQKPGQAPRLLIYGASSRATGIPDRFSGSGSGTDFTLTISRLEPEDFAVYYCQHYPYPPSFTFGQGTKVEIKGLAVSTISSFFPPGYQIYIWAPLAGTCGVLLLSLVITLYCKRGRKKLLYIFKQPFMRPVQTTQEEDGCSCRFPEEEEGGCELRVKFSRSADAPAYQQGQNQLYNELNLGRREEYDVLDKRRGRDPEMGGKPRRKNPQEGLYNELQKDKMAEAYSEIGMKGERRRGKGHDGLYQGLSTATKDTYDALHMQ

SEQ ID NO: 207220 - protein, 486 aa, Artificial Sequence
  Description of Artificial Sequence: Synthetic Chimeric Antigen Receptor
MALPVTALLLPLALLLHAARPEVQLLESGGGLVQPGGSLRLSCAASGFTFGSYAMTWVRQAPGKGLEWVSAISGSGGNTFYADSVKGRFTISRDNSKNTLYLQMNSLRAEDTAVYYCARVSPIAAPMDYWGQGTLVTVSSGGGGSGGGGSGGGGSEIVLTQSPGTLSLSPGERATLSCRASQLGSFYLAWYQQKPGQAPRLLIYGASSRATGIPDRFSGSGSGTDFTLTISRLEPEDFAVYYCQHYNYPPSFTFGQGTKVEIKTTTPAPRPPTPAPTIASQPLSLRPEACRPAAGGAVHTRGLDFACDIYIWAPLAGTCGVLLLSLVITLYCKRGRKKLLYIFKQPFMRPVQTTQEEDGCSCRFPEEEEGGCELRVKFSRSADAPAYQQGQNQLYNELNLGRREEYDVLDKRRGRDPEMGGKPRRKNPQEGLYNELQKDKMAEAYSEIGMKGERRRGKGHDGLYQGLSTATKDTYDALHMQALPPR

SEQ ID NO: 207221 - protein, 672 aa, Artificial Sequence
  Description of Artificial Sequence: Synthetic Chimeric Antigen Receptor
MALPVTALLLPLALLLHAARPEVQLLESGGGLVQPGGSLRLSCAASGFTFGSYAMTWVRQAPGKGLEWVSAISGSGGNTFYADSVKGRFTISRDNSKNTLYLQMNSLRAEDTAVYYCARVSPIAAPMDYWGQGTLVTVSSGGGGSGGGGSGGGGSEIVLTQSPGTLSLSPGERATLSCRASQLGSFYLAWYQQKPGQAPRLLIYGASSRATGIPDRFSGSGSGTDFTLTISRLEPEDFAVYYCQHYNYPPSFTFGQGTKVEIKEPKSPDKTHTCPPCPAPPVAGPSVFLFPPKPKDTLMIARTPEVTCVVVDVSHEDPEVKFNWYVDGVEVHNAKTKPREEQYNSTYRVVSVLTVLHQDWLNGKEYKCKVSNKALPAPIEKTISKAKGQPREPQVYTLPPSRDELTKNQVSLTCLVKGFYPSDIAVEWESNGQPENNYKTTPPVLDSDGSFFLYSKLTVDKSRWQQGNVFSCSVMHEALHNHYTQKSLSLSPGKIYIWAPLAGTCGVLLLSLVITLYCKRGRKKLLYIFKQPFMRPVQTTQEEDGCSCRFPEEEEGGCELRVKFSRSADAPAYQQGQNQLYNELNLGRREEYDVLDKRRGRDPEMGGKPRRKNPQEGLYNELQKDKMAEAYSEIGMKGERRRGKGHDGLYQGLSTATKDTYDALHMQALPPR

SEQ ID NO: 207222 - protein, 453 aa, Artificial Sequence
  Description of Artificial Sequence: Synthetic Chimeric Antigen Receptor
MALPVTALLLPLALLLHAARPEVQLLESGGGLVQPGGSLRLSCAASGFTFSSYPMSWVRQAPGKGLEWVSAIGGSGGSTYYADSVKGRFTISRDNSKNTLYLQMNSLRAEDTAVYYCARYWPMDSWGQGTLVTVSSGGGGSGGGGSGGGGSEIVLTQSPGTLSLSPGERATLSCRASQSVSSTYLAWYQQKPGQAPRLLIYDASSRAPGIPDRFSGSGSGTDFTLTISRLEPEDFAVYYCQQYSTSPLTFGQGTKVEIKGLAVSTISSFFPPGYQIYIWAPLAGTCGVLLLSLVITLYCKRGRKKLLYIFKQPFMRPVQTTQEEDGCSCRFPEEEEGGCELRVKFSRSADAPAYQQGQNQLYNELNLGRREEYDVLDKRRGRDPEMGGKPRRKNPQEGLYNELQKDKMAEAYSEIGMKGERRRGKGHDGLYQGLSTATKDTYDALHMQALPPR

SEQ ID NO: 207223 - protein, 487 aa, Artificial Sequence
  Description of Artificial Sequence: Synthetic Chimeric Antigen Receptor
MALPVTALLLPLALLLHAARPEVQLLESGGGLVQPGGSLRLSCAASGFTFGSYAMTWVRQAPGKGLEWVSAIDYSGGNTFYADSVKGRFTISRDNSKNTLYLQMNSLRAEDTAVYYCARVSPIASGMDYWGQGTLVTVSSGGGGSGGGGSGGGGSEIVLTQSPGTLSLSPGERATLSCRASQSVSSSYPSWYQQKPGQAPRLLIYGASSRATGIPDRFSGSGSGTDFTLTISRLEPEDFAVYYCQHYPYPPSFTFGQGTKVEIKTTTPAPRPPTPAPTIASQPLSLRPEACRPAAGGAVHTRGLDFACDIYIWAPLAGTCGVLLLSLVITLYCKRGRKKLLYIFKQPFMRPVQTTQEEDGCSCRFPEEEEGGCELRVKFSRSADAPAYQQGQNQLYNELNLGRREEYDVLDKRRGRDPEMGGKPRRKNPQEGLYNELQKDKMAEAYSEIGMKGERRRGKGHDGLYQGLSTATKDTYDALHMQALPPR

SEQ ID NO: 207224 - protein, 673 aa, Artificial Sequence
  Description of Artificial Sequence: Synthetic Chimeric Antigen Receptor
MALPVTALLLPLALLLHAARPEVQLLESGGGLVQPGGSLRLSCAASGFTFGSYAMTWVRQAPGKGLEWVSAIDYSGGNTFYADSVKGRFTISRDNSKNTLYLQMNSLRAEDTAVYYCARVSPIASGMDYWGQGTLVTVSSGGGGSGGGGSGGGGSEIVLTQSPGTLSLSPGERATLSCRASQSVSSSYPSWYQQKPGQAPRLLIYGASSRATGIPDRFSGSGSGTDFTLTISRLEPEDFAVYYCQHYPYPPSFTFGQGTKVEIKEPKSPDKTHTCPPCPAPPVAGPSVFLFPPKPKDTLMIARTPEVTCVVVDVSHEDPEVKFNWYVDGVEVHNAKTKPREEQYNSTYRVVSVLTVLHQDWLNGKEYKCKVSNKALPAPIEKTISKAKGQPREPQVYTLPPSRDELTKNQVSLTCLVKGFYPSDIAVEWESNGQPENNYKTTPPVLDSDGSFFLYSKLTVDKSRWQQGNVFSCSVMHEALHNHYTQKSLSLSPGKIYIWAPLAGTCGVLLLSLVITLYCKRGRKKLLYIFKQPFMRPVQTTQEEDGCSCRFPEEEEGGCELRVKFSRSADAPAYQQGQNQLYNELNLGRREEYDVLDKRRGRDPEMGGKPRRKNPQEGLYNELQKDKMAEAYSEIGMKGERRRGKGHDGLYQGLSTATKDTYDALHMQALPPR

SEQ ID NO: 207225 - protein, 453 aa, Artificial Sequence
  Description of Artificial Sequence: Synthetic Chimeric Antigen Receptor
MALPVTALLLPLALLLHAARPEVQLLESGGGLVQPGGSLRLSCAASGFTFSSYPMSWVRQAPGKGLEWVSAIGGSGGWSYYADSVKGRFTISRDNSKNTLYLQMNSLRAEDTAVYYCARYWPMDSWGQGTLVTVSSGGGGSGGGGSGGGGSEIVLTQSPGTLSLSPGERATLSCWLSQSVSSTYLAWYQQKPGQAPRLLIYDASSRAPGIPDRFSGSGSGTDFTLTISRLEPEDFAVYYCQQYSEWPLTFGQGTKVEIKGLAVSTISSFFPPGYQIYIWAPLAGTCGVLLLSLVITLYCKRGRKKLLYIFKQPFMRPVQTTQEEDGCSCRFPEEEEGGCELRVKFSRSADAPAYQQGQNQLYNELNLGRREEYDVLDKRRGRDPEMGGKPRRKNPQEGLYNELQKDKMAEAYSEIGMKGERRRGKGHDGLYQGLSTATKDTYDALHMQALPPR

SEQ ID NO: 207226 - protein, 482 aa, Artificial Sequence
  Description of Artificial Sequence: Synthetic Chimeric Antigen Receptor
MALPVTALLLPLALLLHAARPEVQLLESGGGLVQPGGSLRLSCAASGFTFSSYPMSWVRQAPGKGLEWVSAIGGSGGSTYYADSVKGRFTISRDNSKNTLYLQMNSLRAEDTAVYYCARYWPMDSWGQGTLVTVSSGGGGSGGGGSGGGGSEIVLTQSPGTLSLSPGERATLSCRASQSVSSTYLAWYQQKPGQAPRLLIYDASSRAPGIPDRFSGSGSGTDFTLTISRLEPEDFAVYYCQQYSTSPLTFGQGTKVEIKTTTPAPRPPTPAPTIASQPLSLRPEACRPAAGGAVHTRGLDFACDIYIWAPLAGTCGVLLLSLVITLYCKRGRKKLLYIFKQPFMRPVQTTQEEDGCSCRFPEEEEGGCELRVKFSRSADAPAYQQGQNQLYNELNLGRREEYDVLDKRRGRDPEMGGKPRRKNPQEGLYNELQKDKMAEAYSEIGMKGERRRGKGHDGLYQGLSTATKDTYDALHMQALPPR

SEQ ID NO: 207227 - protein, 668 aa, Artificial Sequence
  Description of Artificial Sequence: Synthetic Chimeric Antigen Receptor
MALPVTALLLPLALLLHAARPEVQLLESGGGLVQPGGSLRLSCAASGFTFSSYPMSWVRQAPGKGLEWVSAIGGSGGSTYYADSVKGRFTISRDNSKNTLYLQMNSLRAEDTAVYYCARYWPMDSWGQGTLVTVSSGGGGSGGGGSGGGGSEIVLTQSPGTLSLSPGERATLSCRASQSVSSTYLAWYQQKPGQAPRLLIYDASSRAPGIPDRFSGSGSGTDFTLTISRLEPEDFAVYYCQQYSTSPRIFGQGTKVEIKEPKSPDKTHTCPPCPAPPVAGPSVFLFPPKPKDTLMIARTPEVTCVVVDVSHEDPEVKFNWYVDGVEVHNAKTKPREEQYNSTYRVVSVLTVLHQDWLNGKEYKCKVSNKALPAPIEKTISKAKGQPREPQVYTLPPSRDELTKNQVSLTCLVKGFYPSDIAVEWESNGQPENNYKTTPPVLDSDGSFFLYSKLTVDKSRWQQGNVFSCSVMHEALHNHYTQKSLSLSPGKIYIWAPLAGTCGVLLLSLVITLYCKRGRKKLLYIFKQPFMRPVQTTQEEDGCSCRFPEEEEGGCELRVKFSRSADAPAYQQGQNQLYNELNLGRREEYDVLDKRRGRDPEMGGKPRRKNPQEGLYNELQKDKMAEAYSEIGMKGERRRGKGHDGLYQGLSTATKDTYDALHMQALPPR

SEQ ID NO: 207228 - protein, 482 aa, Artificial Sequence
  Description of Artificial Sequence: Synthetic Chimeric Antigen Receptor
MALPVTALLLPLALLLHAARPEVQLLESGGGLVQPGGSLRLSCAASGFTFSSYPMSWVRQAPGKGLEWVSAIGGSGGWSYYADSVKGRFTISRDNSKNTLYLQMNSLRAEDTAVYYCARYWPMDSWGQGTLVTVSSGGGGSGGGGSGGGGSEIVLTQSPGTLSLSPGERATLSCWLSQSVSSTYLAWYQQKPGQAPRLLIYDASSRAPGIPDRFSGSGSGTDFTLTISRLEPEDFAVYYCQQYSEWPLTFGQGTKVEIKTTTPAPRPPTPAPTIASQPLSLRPEACRPAAGGAVHTRGLDFACDIYIWAPLAGTCGVLLLSLVITLYCKRGRKKLLYIFKQPFMRPVQTTQEEDGCSCRFPEEEEGGCELRVKFSRSADAPAYQQGQNQLYNELNLGRREEYDVLDKRRGRDPEMGGKPRRKNPQEGLYNELQKDKMAEAYSEIGMKGERRRGKGHDGLYQGLSTATKDTYDALHMQALPPR

SEQ ID NO: 207229 - protein, 668 aa, Artificial Sequence
  Description of Artificial Sequence: Synthetic Chimeric Antigen Receptor
MALPVTALLLPLALLLHAARPEVQLLESGGGLVQPGGSLRLSCAASGFTFSSYPMSWVRQAPGKGLEWVSAIGGSGGWSYYADSVKGRFTISRDNSKNTLYLQMNSLRAEDTAVYYCARYWPMDSWGQGTLVTVSSGGGGSGGGGSGGGGSEIVLTQSPGTLSLSPGERATLSCWLSQSVSSTYLAWYQQKPGQAPRLLIYDASSRAPGIPDRFSGSGSGTDFTLTISRLEPEDFAVYYCQQYSEWPLTFGQGTKVEIKEPKSPDKTHTCPPCPAPPVAGPSVFLFPPKPKDTLMIARTPEVTCVVVDVSHEDPEVKFNWYVDGVEVHNAKTKPREEQYNSTYRVVSVLTVLHQDWLNGKEYKCKVSNKALPAPIEKTISKAKGQPREPQVYTLPPSRDELTKNQVSLTCLVKGFYPSDIAVEWESNGQPENNYKTTPPVLDSDGSFFLYSKLTVDKSRWQQGNVFSCSVMHEALHNHYTQKSLSLSPGKIYIWAPLAGTCGVLLLSLVITLYCKRGRKKLLYIFKQPFMRPVQTTQEEDGCSCRFPEEEEGGCELRVKFSRSADAPAYQQGQNQLYNELNLGRREEYDVLDKRRGRDPEMGGKPRRKNPQEGLYNELQKDKMAEAYSEIGMKGERRRGKGHDGLYQGLSTATKDTYDALHMQALPPR

SEQ ID NO: 207230 - protein, 373 aa, Artificial Sequence
  Description of Artificial Sequence: Synthetic Chimeric Antigen Receptor
PGWFLDSPDRPWNPPTFSPALLVVTEGDNATFTCSFSNTSESFVLNWYRMSPSNQTDKLAAFPEDRSQPGQDCRFRVTQLPNGRDFHMSVVRARRNDSGTYLCGAISLAPKAQIKESLRAELRVTERRAEVPTAHPSPSPRPAGQFQTLVTTTPAPRPPTPAPTIASQPLSLRPEACRPAAGGAVHTRGLDFACDIYIWAPLAGTCGVLLLSLVITLYCKRGRKKLLYIFKQPFMRPVQTTQEEDGCSCRFPEEEEGGCELRVKFSRSADAPAYKQGQNQLYNELNLGRREEYDVLDKRRGRDPEMGGKPRRKNPQEGLYNELQKDKMAEAYSEIGMKGERRRGKGHDGLYQGLSTATKDTYDALHMQALPPR

SEQ ID NO: 207231 - protein, 354 aa, Artificial Sequence
  Description of Artificial Sequence: Synthetic Chimeric Antigen Receptor
MALPVTALLLPLALLLHAARPPGWFLDSPDRPWNPPTFSPALLVVTEGDNATFTCSFSNTSESFYLNWYRMSPSNQTDKLAAFPEDRSQPGQDCRFRVTQLPNGRDFHMSVYRARRNDSGTYLCGAISLAPKAQIKESLRAELRVTERRAEVPTAHPSPSPRPAGQFQTLVTTTPAPRPPTPAPTIASQPLSLRPEACRPAAGGAVHTRGLDFACDIYIWAPLAGDGCSCRFPEEEEGGCELRVKFSRSADAPAYKQGQNQLYNELNLGRREEYDVLDKRRGRDPEMGGKPRRKNPQEGLYNELQKDKMAEAYSEIGMKGERRRGKGHDGLYQGLSTATKDTYDALHMQALPPR

SEQ ID NO: 207232 - protein, 367 aa, Artificial Sequence
  Description of Artificial Sequence: Synthetic Chimeric Antigen Receptor
MALPVTALLLPLALLLHAARPPGWFLDSPDRPWNPPTFSPALLVVTEGDNATFTCSFSNTSESFVLNWYRMSPSNQTDKLAAFPEDRSQPGQDCRFRVTQLPNGRDFHMSVVRARRNDSGTYLCGAISLAPKAQIKESLRAELRVTERRAEVPTAHPSPSPRPAGQFQTLVTTTPAPRPPTPAPTIASQPLSLRPEACRPAAGGAVHTRGLDFACDIYIWAPLAGTCGVLLLSLVITLYCKRGRKKLLGGGGSGGGGSGVQVETISPGDGRTFPKRGQTCVVHYTGMLEDGKKFDSSRDRNKPFKFMLGKQEVIRGWEEGVAQMSVGQRAKLTISPDYAYGATGHPGIIPPHATLVFDVELLKLETS

SEQ ID NO: 207233 - protein, 372 aa, Artificial Sequence
  Description of Artificial Sequence: Synthetic Chimeric Antigen Receptor
PGWFLDSPDRPWNPPTFSPALLVVTEGDNATFTCSFSNTSESFVLNWYRMSPSNQTDKLAAFPEDRSQPGQDCRFRVTQLPNGRDFHMSVVRARRNDSGTVLCGAISLAPKAQIKESHAELRVTERRAEVPTAHPSPSPRPAGQFQTLVTTTPAPRPPTPAPTIASQPLSLRPEACRPAAGGAVHTRGLDFACDIYIWAPLAGTCGVLLLSLVITLYCKRGRKKLLYIFKQPFMRPVQTTQEEDGCSCRFPEEEEGGCELRVKFSRSADAPAYKQGQNQLYNELNLGRREEYDVLDKRRGRDPEMGGKPRRKNPQEGLYNELQKDKMAEAYSEIGMKGERRRGKGHDGLYQGLSTATKDTYDALHMQALPPR

SEQ ID NO: 207234 - protein, 373 aa, Artificial Sequence; identical to SEQ ID NO: 207230
  Description of Artificial Sequence: Synthetic Chimeric Antigen Receptor

SEQ ID NO: 207235 - protein, 373 aa, Artificial Sequence; identical to SEQ ID NO: 207230
  Description of Artificial Sequence: Synthetic Chimeric Antigen Receptor

SEQ ID NO: 207236 - protein, 373 aa, Artificial Sequence
  Description of Artificial Sequence: Synthetic Chimeric Antigen Receptor
PGWFLDSPDRPWNPPTFSPALLVVTEGDNATFTCSFSNTSESFYLNWYRMSPSNQTDKLAAFPEDRSQPGQDCRFRVTQLPNGRDFHMSVYRARRNDSGTYLCGAISLAPKAQIKESLRAELRVTERRAEVPTAHPSPSPRPAGQFQTLVTTTPAPRPPTPAPTIASQPLSLRPEACRPAAGGAVHTRGLDFACDIYIWAPLAGTCGVLLLSLVITLYCKRGRKKLLYIFKQPFMRPVQTTQEEDGCSCRFPEEEEGGCELRVKFSRSADAPAYKQGQNQLYNELNLGRREEYDVLDKRRGRDPEMGGKPRRKNPQEGLYNELQKDKMAEAYSEIGMKGERRRGKGHDGLYQGLSTATKDTYDALHMQALPPR

SEQ ID NO: 207237 - protein, 386 aa, Artificial Sequence
  Description of Artificial Sequence: Synthetic Chimeric Antigen Receptor
MALPVTALLLPLALLLHAARPGSGSGAQAAEVQLQQSGPELVKPGTSVRISCKTSGYTFTEYTIHWVKQSHGKSLEWIGNINPNNGGTTYNQKFEDKATLTVDKSSSTAYMELRSLTSEDSAVYYCAAGWNFDYWGQGTTVTVSSGGGGSGGGGSGGGGSDIVMTQSHKFMSTSVGDRVSIICKASQDVGTAVDWYQQKPGQSPKLLIYWASTRHTGVPDRFTGSGSGTDFTLTITNVQSEDLADYFCQQYNSYPLTFGAGTMLDLKRAAARSDPASGAGSGSGSAIELLPVPGAKKSAKLYIPYIILTIIILTIVGFIWLLKVNGCRKYKLNKTESTPVVEEDEMQPYASYTEKNNPLYDTTNKVKASEALQSEVDTDLHTLSHG

SEQ ID NO: 207238 - protein, 390 aa, Artificial Sequence
  Description of Artificial Sequence: Synthetic Chimeric Antigen Receptor
MALPVTALLLPLALLLHAARPPGWFLDSPDRPWPPTFSPALLVVTEGDNATFTCSFSNTSESFVLNWYRMSPSNQTDKLAAFPEDRSQPGQDCRFRVTQLPNGRDFHMSVWARRDSGTYLCGAISLAPKAQIKESLRAELRVTERRAEVPTAHPSPSPRPAGQFQTLVTTTPAPRPPTPAPTIASQPLSLRPEACRPAAGGAVHTRGLDFACDRYIWAPLAGTCGVLLLSLVITLYCKRGRKKLLYIFKQPFMRPVQTTQEEDGCSCRFPEEEEGGCELRVKFSRSADAPAYKQGQNQLYNELNLGRREEYDVLDKRRGRDPEMGGKPRRKPQEGLYNELQKDKMAEAYSEIGMKGERRRGKGHDGLYQGLSTATKDTYDALHMQALPPR

SEQ ID NO: 207239 - protein, 394 aa, Artificial Sequence
  Description of Artificial Sequence: Synthetic Chimeric Antigen Receptor
MALPVTALLLPLALLLHAARPPGWFLDSPDRPWNPPTFSPALLVVTEGDNATFTCSFSNTSESFVLNWVRMSPSNQTDKLAAFPEDRSQPGQDCRFRVTQLPNGRDFHMSVVRARRNDSGTVLCGAISLAPKAQIKESLRAELRVTERRAEVPTAHPSPSPRPAGQFQTLVTTTPAPRPPTPAPTIASQPLSLRPEACRPAAGGAVHTRGLDFACDIYIWAPLAGTCGVLLLSLVITLYCKRGRKKLLYIFKQPFMRPVQTTQEEDGCSCRFPEEEEGGCELRVKFSRSADAPAYKQGQNQLYNELNLGRREEYDVLDKRRGRDPEMGGKPRRKNPQEGLYNELQKDKMAEAYSEIGMKGERRRGKGHDGLYQGLSTATKDTYDALHMQALPPR

SEQ ID NO: 207240 - protein, 394 aa, Artificial Sequence
  Description of Artificial Sequence: Synthetic Chimeric Antigen Receptor
MALPVTALLLPLALLLHAARPPGWFLDSPDRPWNPPTFSPALLVVTEGDNATFTCSFSNTSESFVLNWYRMSPSNQTDKLAAFPEDRSQPGQDCRFRVTQLPNGRDFHMSVVRARRNDSGTYLCGAISLAPKAQIKESLRAEIRVTERRAEVPTAHPSPSPRPAGQFQTLVTTTPAPRPPTPAPTIASQPLSLRPEACRPAAGGAVHTRGLDFACDIYIWAPLAGTCGVLIISLVITLYCKRGRKKLLYIFKQPFMRPVQTTQEEDGCSCRFPEEEEGGCELRVKFSRSADAPAYKQGQNQLYNELNLGRREEYDVLDKRRGRDPEMGGKPRRKNPQEGLYNELQKDKMAEAYSEIGMKGERRRGKGHDGLYQGLSTATKDTYDALHMQALPPR

SEQ ID NO: 207241 - protein, 488 aa, Artificial Sequence
  Description of Artificial Sequence: Synthetic Chimeric Antigen Receptor
MALPVTALLLPLALLLHAARPQVQLVQSGGGLVQPGRSLRLSCAASGFTFDDYAMHWVRQAPGKGLEWVSGISWNSGSIGYADSVKGRFTISRDNAKNSLYLQMNSLRAEDTAVYYCAKDGSSSWSWGYFDYWGQGTLVTVSSGGGGSGGGGSGGGGSSSELTQDPAVSVALGQTVRTTCQGDALRSYYASWYQQKPGQAPMLVIYGKNNRPSGIPDRFSGSDSGDTASLTITGAQAEDEADYYCNSRDSSGYPVFGTGTKVTVLTTTPAPRPPTPAPTIASQPLSLRPEACRPAAGGAVHTRGLDFACDIYIWAPLAGTCGVLLLSLVITLYCKRGRKKLLYIFKQPFMRPVQTTQEEDGCSCRFPEEEEGGCELRVKFSRSADAPAYKQGQNQLYNELNLGRREEYDVLDKRRGRDPEMGGKPRRKNPQEGLYNELQKDKMAEAYSEIGMKGERRRGKGHDGLYQGLSTATKDTYDALHMQALPPR

SEQ ID NO: 207242 - DNA, 1182 bp, Artificial Sequence
  Description of Artificial Sequence: Synthetic Chimeric Antigen Receptor
atggccctccctgtcactgccctgcttctccccctcgcactcctgctccacgccgctagaccacccggatggtttctggactctccggatcgcccgtggaatcccccaaccttctcaccggcactcttggttgtgactgagggcgataatgcgaccttcacgtgctcgttctccaacacctccgaatcattcgtgctgaactggtaccgcatgagcccgtcaaaccagaccgacaagctcgccgcgtttccggaagatcggtcgcaaccgggacaggattgtcggttccgcgtgactcaactgccgaatggcagagacttccacatgagcgtggtccgcgctaggcgaaacgactccgggacctacctgtgcggagccatctcgctggcgcctaaggcccaaatcaaagagagcttgagggccgaactgagagtgaccgagcgcagagctgaggtgccaactgcacatccatccccatcgcctcggcctgcggggcagtttcagaccctggtcacgaccactccggcgccgcgcccaccgactccggccccaactatcgcgagccagcccctgtcgctgaggccggaagcatgccgccctgccgccggaggtgctgtgcatacccggggattggacttcgcatgcgacatctacatttgggctcctctcgccggaacttgtggcgtgctccttctgtccctggtcatcaccctgtactgcaagcggggtcggaaaaagcttctgtacattttcaagcagcccttcatgaggcccgtgcaaaccacccaggaggaggacggttgctcctgccggttccccgaagaggaagaaggaggttgcgagctgcgcgtgaagttctcccggagcgccgacgcccccgcctataagcagggccagaaccagctgtacaacgaactgaacctgggacggcgggaagagtacgatgtgctggacaagcggcgcggccgggaccccgaaatgggcgggaagcctagaagaaagaaccctcaggaaggcctgtataacgagctgcagaaggacaagatggccgaggcctactccgaaattgggatgaagggagagcggcggaggggaaaggggcacgacggcctgtaccaaggactgtccaccgccaccaaggacacatacgatgccctgcacatgcaggcccttccccctcgc

SEQ ID NO: 207243 - protein, 488 aa, Artificial Sequence
  Description of Artificial Sequence: Synthetic Chimeric Antigen Receptor
MALPVTALLLPLALLLHAARPQVQLQQSGAEVKKPGASVKVSCKASGYTFTGYYMHWVRQAPGQGLEWMGRINPNSGGTNYAQKFQGRVTMTRDTSISTAYMELSRLRSEDTAVYYCARGRYYGMDVWGQGTMVTVSSGGGGSGGGGSGGGGSGGGGSEIVLTQSPATLSLSPGERATISCRASQSVSSNFAWYQQRPGQAPRLLIYDASNRATGIPPRFSGSGSGTDFTLTISSLEPEDFAAYYCHQRSNWLYTFGQGTKVDIKTTTPAPRPPTPAPTIASQPLSLRPEACRPAAGGAVHTRGLDFACDIYIWAPLAGTCGVLLLSLVITLYCKRGRKKLLYIFKQPFMRPVQTTQEEDGCSCRFPEEEEGGCELRVKFSRSADAPAYKQGQNQLYNELNLGRREEYDVLDKRRGRDPEMGGKPRRKNPQEGLYNELQKDKMAEAYSEIGMKGERRRGKGHDGLYQGLSTATKDTYDALHMQALPPR

SEQ ID NO: 207244 - protein, 499 aa, Artificial Sequence
  Description of Artificial Sequence: Synthetic Chimeric Antigen Receptor
MALPVTALLLPLALLLHAARPQVQLVQSGAEVKKPGASVKVSCKASGYTFTSYGISWVRQAPGQGLEWMGWISAYNGNTNYAQKLQGRVTMTTDTSTSTAYMELRSLRSDDTAVYYCARVAGGIYYYYGMDVWGQGTTITVSSGGGGSGGGGSGGGGSGGGGSDIVMTQTPDSLAVSLGERATISCKSSHSVLYNRNNKNYLAWYQQKPGQPPKLLFYWASTRKSGVPDRFSGSGSGTDFTLTISSLQPEDFATYFCQQTQTFPLTFGQGTRLEINTTTPAPRPPTPAPTIASQPLSLRPEACRPAAGGAVHTRGLDFACDIYIWAPLAGTCGVLLLSLVITLYCKRGRKKLLYIFKQPFMRPVQTTQEEDGCSCRFPEEEEGGCELRVKFSRSADAPAYKQGQNQLYNELNLGRREEYDVLDKRRGRDPEMGGKPRRKNPQEGLYNELQKDKMAEAYSEIGMKGERRRGKGHDGLYQGLSTATKDTYDALHMQALPPR

SEQ ID NO: 207245 - protein, 485 aa, Artificial Sequence
  Description of Artificial Sequence: Synthetic Chimeric Antigen Receptor
MALPVTALLLPLALLLHAARPQVQLQQSGAEVKKPGASVKVSCKASGYTFTGYYMHWVRQAPGQGLEWMGWINPNSGGTNYAQNFQGRVTMTRDTSISTAYMELRRLRSDDTAVYYCASGWDFDYWGQGTLVTVSSGGGGSGGGGSGGGGSGGGGSDIRMTQSPSSLSASVGDRVTITCRASQSIRYYLSWYQQKPGKAPKLLIYTASILQNGVPSRFSGSGSGTDFTLTISSLQPEDFATYYCLQTYTTPDFGPGTKVEIKTTTPAPRPPTPAPTIASQPLSLRPEACRPAAGGAVHTRGLDFACDIYIWAPLAGTCGVLLLSLVITLYCKRGRKKLLYIFKQPFMRPVQTTQEEDGCSCRFPEEEEGGCELRVKFSRSADAPAYKQGQNQLYNELNLGRREEYDVLDKRRGRDPEMGGKPRRKNPQEGLYNELQKDKMAEAYSEIGMKGERRRGKGHDGLYQGLSTATKDTYDALHMQALPPR

SEQ ID NO: 207246 - protein, 490 aa, Artificial Sequence
  Description of Artificial Sequence: Synthetic Chimeric Antigen Receptor
MALPVTALLLPLALLLHAARPQVQLVQSGAEVKKPGASVKVSCKASGYTFTGYYMHWVRQAPGQGLEWMGRINPNSGGTNYAQKFQGRVTMTTDTSTSTAYMELRSLRSDDTAVYYCARTTTSYAFDIWGQGTMVTVSSGGGGSGGGGSGGGGSGGGGSDIQLTQSPSTLSASVGDRVTITCRASQSISTWLAWYQQKPGKAPNLLIYKASTLESGVPSRFSGSGSGTEFTLTISSLQPDDFATYYCQQYNTYSPYTFGQGTKLEIKTTTPAPRPPTPAPTIASQPLSLRPEACRPAAGGAVHTRGLDFACDIYIWAPLAGTCGVLLLSLVITLYCKRGRKKLLYIFKQPFMRPVQTTQEEDGCSCRFPEEEEGGCELRVKFSRSADAPAYKQGQNQLYNELNLGRREEYDVLDKRRGRDPEMGGKPRRKNPQEGLYNELQKDKMAEAYSEIGMKGERRRGKGHDGLYQGLSTATKDTYDALHMQALPPR

SEQ ID NO: 207247 - protein, 493 aa, Artificial Sequence
  Description of Artificial Sequence: Synthetic Chimeric Antigen Receptor
MALPVTALLLPLALLLHAARPQVQLVQSGGGLVKPGGSLRLSCEASGFIFSDYYMGWIRQAPGKGLEWVSYIGRSGSSMYYADSVKGRFTFSRDNAKNSLYLQMNSLRAEDTAVYYCAASPVVAATEDFQHWGQGTLVTVSSGGGGSGGGGSGGGGSGGGGSDIVMTQTPATLSLSPGERATLSCRASQSVTSNYLAWYQQKPGQAPRLLLFGASTRATGIPDRFSGSGSGTDFTLTINRLEPEDFAMYYCQQYGSAPVTFGQGTKLEIKTTTPAPRPPTPAPTIASQPLSLRPEACRPAAGGAVHTRGLDFACDIYIWAPLAGTCGVLLLSLVITLYCKRGRKKLLYIFKQPFMRPVQTTQEEDGCSCRFPEEEEGGCELRVKFSRSADAPAYKQGQNQLYNELNLGRREEYDVLDKRRGRDPEMGGKPRRKNPQEGLYNELQKDKMAEAYSEIGMKGERRRGKGHDGLYQGLSTATKDTYDALHMQALPPR

SEQ ID NO: 207248 - protein, 493 aa, Artificial Sequence
  Description of Artificial Sequence: Synthetic Chimeric Antigen Receptor
MALPVTALLLPLALLLHAARPQVQLVQSGAEVRAPGASVKISCKASGFTFRGYYIHWVRQAPGQGLEWMGIINPSGGSRAYAQKFQGRVTMTRDTSTSTVYMELSSLRSDDTAMYYCARTASCGGDCYYLDYWGQGTLVTVSSGGGGSGGGGSGGGGSGGGGSDIQMTQSPPTLSASVGDRVTITCRASENVNIWLAWYQQKPGKAPKLLIYKSSSLASGVPSRFSGSGSGAEFTLTISSLQPDDFATYYCQQYQSYPLTFGGGTKVDIKTTTPAPRPPTPAPTIASQPLSLRPEACRPAAGGAVHTRGLDFACDIYIWAPLAGTCGVLLLSLVITLYCKRGRKKLLYIFKQPFMRPVQTTQEEDGCSCRFPEEEEGGCELRVKFSRSADAPAYKQGQNQLYNELNLGRREEYDVLDKRRGRDPEMGGKPRRKNPQEGLYNELQKDKMAEAYSEIGMKGERRRGKGHDGLYQGLSTATKDTYDALHMQALPPR

SEQ ID NO: 207249 - protein, 490 aa, Artificial Sequence
  Description of Artificial Sequence: Synthetic Chimeric Antigen Receptor
MALPVTALLLPLALLLHAARPEVQLVESGGGLVQPGRSLRLSCAASGFTFDDYAMHWVRQAPGKGLEWVSGISWNSGSTGYADSVKGRFTISRDNAKNSLYLQMNSLRAEDTALYYCAKDSSSWYGGGSAFDIWGQGTMVTVSSGGGGSGGGGSGGGGSSSELTQEPAVSVALGQTVRITCQGDSLRSYYASWYQQKPGQAPVLVIFGRSRRPSGIPDRFSGSSSGNTASLIITGAQAEDEADYYCNSRDNTANHYVFGTGTKLTVLTTTPAPRPPTPAPTIASQPLSLRPEACRPAAGGAVHTRGLDFACDIYIWAPLAGTCGVLLLSLVITLYCKRGRKKLLYIFKQPFMRPVQTTQEEDGCSCRFPEEEEGGCELRVKFSRSADAPAYKQGQNQLYNELNLGRREEYDVLDKRRGRDPEMGGKPRRKNPQEGLYNELQKDKMAEAYSEIGMKGERRRGKGHDGLYQGLSTATKDTYDALHMQALPPR

SEQ ID NO: 207250 - protein, 490 aa, Artificial Sequence
  Description of Artificial Sequence: Synthetic Chimeric Antigen Receptor
MALPVTALLLPLALLLHAARPEVQLVESGGGLVQPGRSLRLSCAASGFTFDDYAMHWVRQAPGKGLEWVSGISWNSGSTGYADSVKGRFTISRDNAKNSLYLQMNSLRAEDTALYYCAKDSSSWYGGGSAFDIWGQGTMVTVSSGGGGSGGGGSGGGGSSSELTQDPAVSVALGQTVRITCQGDSLRSYYASWYQQKPGQAPVLVIYGKNNRPSGIPDRFSGSSSGNTASLTITGAQAEDEADYYCNSRGSSGNHYVFGTGTKVTVLTTTPAPRPPTPAPTIASQPLSLRPEACRPAAGGAVHTRGLDFACDIYIWAPLAGTCGVLLLSLVITLYCKRGRKKLLYIFKQPFMRPVQTTQEEDGCSCRFPEEEEGGCELRVKFSRSADAPAYKQGQNQLYNELNLGRREEYDVLDKRRGRDPEMGGKPRRKNPQEGLYNELQKDKMAEAYSEIGMKGERRRGKGHDGLYQGLSTATKDTYDALHMQALPPR

SEQ ID NO: 207251 - protein, 495 aa, Artificial Sequence
  Description of Artificial Sequence: Synthetic Chimeric Antigen Receptor
MALPVTALLLPLALLLHAARPQVQLVQSGGGLVQPGGSLRLSCAASGFTFSSYWMHWVRQAPGKGLVWVSRINSDGSSTSYADSVKGRFTISRDNAKNTLYLQMNSLRAEDTAVYYCVRTGWVGSYYYYMDVWGKGTTVTVSSGGGGSGGGGSGGGGSGGGGSEIVLTQSPGTLSLSPGERATLSCRASQSVSSNYLAWYQQKPGQPPRLLIYDVSTRATGIPARFSGGGSGTDFTLTISSLEPEDFAVYYCQQRSNWPPWTFGQGTKVEIKTTTPAPRPPTPAPTIASQPLSLRPEACRPAAGGAVHTRGLDFACDIYIWAPLAGTCGVLLLSLVITLYCKRGRKKLLYIFKQPFMRPVQTTQEEDGCSCRFPEEEEGGCELRVKFSRSADAPAYKQGQNQLYNELNLGRREEYDVLDKRRGRDPEMGGKPRRKNPQEGLYNELQKDKMAEAYSEIGMKGERRRGKGHDGLYQGLSTATKDTYDALHMQALPPR

SEQ ID NO: 207252 - protein, 494 aa, Artificial Sequence
  Description of Artificial Sequence: Synthetic Chimeric Antigen Receptor
MALPVTALLLPLALLLHAARPQVQLVQSGGGVVQPGRSLRLSCAASGFTFSSYGMHWVRQAPGKGLEWVAVISYDGSNKYYADSVKGRFTISRDNSKNTLYLQMNSLRAEDTAVYYCAKGYSRYYYYGMDVWGQGTTVTVSSGGGGSGGGGSGGGGSGGGGSEIVMTQSPATLSLSPGERAILSCRASQSVYTKYLGWYQQKPGQAPRLLIYDASTRATGIPDRFSGSGSGTDFTLTINRLEPEDFAVYYCQHYGGSPLITFGQGTKVDIKTTTPAPRPPTPAPTIASQPLSLRPEACRPAAGGAVHTRGLDFACDIYIWAPLAGTCGVLLLSLVITLYCKRGRKKLLYIFKQPFMRPVQTTQEEDGCSCRFPEEEEGGCELRVKFSRSADAPAYKQGQNQLYNELNLGRREEYDVLDKRRGRDPEMGGKPRRKNPQEGLYNELQKDKMAEAYSEIGMKGERRRGKGHDGLYQGLSTATKDTYDALHMQALPPR

SEQ ID NO: 207253 - protein, 497 aa, Artificial Sequence
  Description of Artificial Sequence: Synthetic Chimeric Antigen Receptor
MALPVTALLLPLALLLHAARPQVQLVQSGAEVKKPGASVKVSCKASGYTFTGYYMHWVRQAPGQGLEWMGWINPNSGGTNYAQKFQGRVTMTRDTSISTAYMELSRLRSDDTAVYYCARDLRRTVVTPRAYYGMDVWGQGTTVTVSSGGGGSGGGGSGGGGSGGGGSDIQLTQSPSTLSASVGDRVTITCQASQDISNSLNWYQQKAGKAPKLLIYDASTLETGVPSRFSGSGSGTDFSFTISSLQPEDIATYYCQQHDNLPLTFGQGTKVEIKTTTPAPRPPTPAPTIASQPLSLRPEACRPAAGGAVHTRGLDFACDIYIWAPLAGTCGVLLLSLVITLYCKRGRKKLLYIFKQPFMRPVQTTQEEDGCSCRFPEEEEGGCELRVKFSRSADAPAYKQGQNQLYNELNLGRREEYDVLDKRRGRDPEMGGKPRRKNPQEGLYNELQKDKMAEAYSEIGMKGERRRGKGHDGLYQGLSTATKDTYDALHMQALPPR

SEQ ID NO: 207254 - protein, 493 aa, Artificial Sequence
  Description of Artificial Sequence: Synthetic Chimeric Antigen Receptor
MALPVTALLLPLALLLHAARPQVQLVQSGGGLVQPGGSLRLSCAASGFTFSSYAMSWVRQAPGKGLEWVSAISGSGGSTYYADSVKGRFTISRDNSKNTLYLQMNSLRAEDTAVYYCAKREAAAGHDWYFDLWGRGTLVTVSSGGGGSGGGGSGGGGSGGGGSDIRVTQSPSSLSASVGDRVTITCRASQSISSYLNWYQQKPGKAPKLLIYAASSLQSGVPSRFSGSGSGTDFTLTISSLQPEDFATYYCQQSYSIPLTFGQGTKVEIKTTTPAPRPPTPAPTIASQPLSLRPEACRPAAGGAVHTRGLDFACDIYIWAPLAGTCGVLLLSLVITLYCKRGRKKLLYIFKQPFMRPVQTTQEEDGCSCRFPEEEEGGCELRVKFSRSADAPAYKQGQNQLYNELNLGRREEYDVLDKRRGRDPEMGGKPRRKNPQEGLYNELQKDKMAEAYSEIGMKGERRRGKGHDGLYQGLSTATKDTYDALHMQALPPR

SEQ ID NO: 207255 - protein, 491 aa, Artificial Sequence
  Description of Artificial Sequence: Synthetic Chimeric Antigen Receptor
MALPVTALLLPLALLLHAARPQVQLVQSWAEVKKPGASVKVSCKASGYTFTSYYMHWVRQAPGQGLEWMGIINPSGGSTSYAQKFQGRVTMTRDTSTSTVYMELSNLRSEDTAVYYCARSPRVTTGYFDYWGQGTLVTVSSGGGGSGGGGSGGGGSGGGGSDIQLTQSPSTLSASVGDRVTITCRASQSISSWLAWYQQKPGKAPKLLIYKASSLESGVPSRFSGSGSGTEFTLTISSLQPDDFATYYCQQYSSYPLTFGGGTRLEIKTTTPAPRPPTPAPTIASQPLSLRPEACRPAAGGAVHTRGLDFACDIYIWAPLAGTCGVLLLSLVITLYCKRGRKKLLYIFKQPFMRPVQTTQEEDGCSCRFPEEEEGGCELRVKFSRSADAPAYKQGQNQLYNELNLGRREEYDVLDKRRGRDPEMGGKPRRKNPQEGLYNELQKDKMAEAYSEIGMKGERRRGKGHDGLYQGLSTATKDTYDALHMQALPPR

SEQ ID NO: 207256 - protein, 497 aa, Artificial Sequence
  Description of Artificial Sequence: Synthetic Chimeric Antigen Receptor
MALPVTALLLPLALLLHAARPQVQLVQSGAEVRRPGASVKISCRASGDTSTRHYIHWLRQAPGQGPEWMGVINPTTGPATGSPAYAQMLQGRVTMTRDTSTRTVYMELRSLRFEDTAVYYCARSVVGRSAPYYFDYWGQGTLVTVSSGGGGSGGGGSGGGGSGGGGSDIQMTQSPSSLSASVGDRVTITCRASQGISDYSAWYQQKPGKAPKLLIYAASTLQSGVPSRFSGSGSGTDFTLTISYLQSEDFATYYCQQYYSYPLTFGGGTKVDIKTTTPAPRPPTPAPTIASQPLSLRPEACRPAAGGAVHTRGLDFACDIYIWAPLAGTCGVLLLSLVITLYCKRGRKKLLYIFKQPFMRPVQTTQEEDGCSCRFPEEEEGGCELRVKFSRSADAPAYKQGQNQLYNELNLGRREEYDVLDKRRGRDPEMGGKPRRKNPQEGLYNELQKDKMAEAYSEIGMKGERRRGKGHDGLYQGLSTATKDTYDALHMQALPPR

SEQ ID NO: 207257 - protein, 493 aa, Artificial Sequence
  Description of Artificial Sequence: Synthetic Chimeric Antigen Receptor
MALPVTALLLPLALLLHAARPQVQLQQSGAEVKKPGASVKVSCKASGYTFTNYYMHWVRQAPGQGLEWMGIINPSGGYTTYAQKFQGRLTMTRDTSTSTVYMELSSLRSEDTAVYYCARIRSCGGDCYYFDNWGQGTLVTVSSGGGGSGGGGSGGGGSGGGGSDIQLTQSPSTLSASVGDRVTITCRASENVNIWLAWYQQKPGKAPKLLIYKSSSLASGVPSRFSGSGSGAEFTLTISSLQPDDFATYYCQQYQSYPLTFGGGTKVDIKTTTPAPRPPTPAPTIASQPLSLRPEACRPAAGGAVHTRGLDFACDIYIWAPLAGTCGVLLLSLVITLYCKRGRKKLLYIFKQPFMRPVQTTQEEDGCSCRFPEEEEGGCELRVKFSRSADAPAYKQGQNQLYNELNLGRREEYDVLDKRRGRDPEMGGKPRRKNPQEGLYNELQKDKMAEAYSEIGMKGERRRGKGHDGLYQGLSTATKDTYDALHMQALPPR

SEQ ID NO: 207258 - protein, 490 aa, Artificial Sequence
  Description of Artificial Sequence: Synthetic Chimeric Antigen Receptor
MALPVTALLLPLALLLHAARPQITLKESGPALVKPTQTLTLTCTFSGFSLSTAGVHVGWIRQPPGKALEWLALISWADDKRYRPSLRSRLDITRVTSKDQVVLSMTNMQPEDTATYYCALQGFDGYEANWGPGTLVTVSSGGGGSGGGGSGGGGSGGGGSDIVMTQSPSSLSASAGDRVTITCRASRGISSALAWYQQKPGKPPKLLIYDASSLESGVPSRFSGSGSGTDFTLTIDSLEPEDFATYYCQQSYSTPWTFGQGTKVDIKTTTPAPRPPTPAPTIASQPLSLRPEACRPAAGGAVHTRGLDFACDIYIWAPLAGTCGVLLLSLVITLYCKRGRKKLLYIFKQPFMRPVQTTQEEDGCSCRFPEEEEGGCELRVKFSRSADAPAYKQGQNQLYNELNLGRREEYDVLDKRRGRDPEMGGKPRRKNPQEGLYNELQKDKMAEAYSEIGMKGERRRGKGHDGLYQGLSTATKDTYDALHMQALPPR

SEQ ID NO: 207259 - protein, 490 aa, Artificial Sequence
  Description of Artificial Sequence: Synthetic Chimeric Antigen Receptor
MALPVTALLLPLALLLHAARPQVQLVQSGAEVKKPGAPVKVSCKASGYTFTGYYMHWVRQAPGQGLEWMGWINPNSGGTNYAQKFQGRVTMTRDTSISTAYMELSRLRSDDTAVYYCARGEWDGSYYYDYWGQGTLVTVSSGGGGSGGGGSGGGGSGGGGSDIVLTQTPSSLSASVGDRVTITCRASQSINTYLNWYQHKPGKAPKLLIYAASSLQSGVPSRFSGSGSGTDFTLTISSLQPEDFATYYCQQSFSPLTFGGGTKLEIKTTTPAPRPPTPAPTIASQPLSLRPEACRPAAGGAVHTRGLDFACDIYIWAPLAGTCGVLLLSLVITLYCKRGRKKLLYIFKQPFMRPVQTTQEEDGCSCRFPEEEEGGCELRVKFSRSADAPAYKQGQNQLYNELNLGRREEYDVLDKRRGRDPEMGGKPRRKNPQEGLYNELQKDKMAEAYSEIGMKGERRRGKGHDGLYQGLSTATKDTYDALHMQALPPR

SEQ ID NO: 207260 - protein, 486 aa, Artificial Sequence
  Description of Artificial Sequence: Synthetic Chimeric Antigen Receptor
MALPVTALLLPLALLLHAARPQVQLVESGGGLVQPGGSLRLSCAASGFTFSSYWMHWVRQVPGKGLVWVSRINTDGSTTTYADSVEGRFTISRDNAKNTLYLQMNSLRDDDTAVYYCVGGHWAVWGQGTTVTVSSGGGGSGGGGSGGGGSGGGGSDIQMTQSPSTLSASVGDRVTITCRASQSISDRLAWYQQKPGKAPKLLIYKASSLESGVPSRFSGSGSGTEFTLTISSLQPDDFAVYYCQQYGHLPMYTFGQGTKVEIKTTTPAPRPPTPAPTIASQPLSLRPEACRPAAGGAVHTRGLDFACDIYIWAPLAGTCGVLLLSLVITLYCKRGRKKLLYIFKQPFMRPVQTTQEEDGCSCRFPEEEEGGCELRVKFSRSADAPAYKQGQNQLYNELNLGRREEYDVLDKRRGRDPEMGGKPRRKNPQEGLYNELQKDKMAEAYSEIGMKGERRRGKGHDGLYQGLSTATKDTYDALHMQALPPR

SEQ ID NO: 207261 - protein, 485 aa, Artificial Sequence
  Description of Artificial Sequence: Synthetic Chimeric Antigen Receptor
MALPVTALLLPLALLLHAARPQVQLVQSGAEVEKPGASVKVSCKASGYTFTDYYMHWVRQAPGQGLEWMGWINPNSGGTNYAQKFQGRVTMTRDTSISTAYMELSRLRSDDTAVYYCASGWDFDYWGQGTLVTVSSGGGGSGGGGSGGGGSGGGGSDIVMTQSPSSLSASVGDRVTITCRASQSIRYYLSWYQQKPGKAPKLLIYTASILQNGVPSRFSGSGSGTDFTLTISSLQPEDFATYYCLQTYTTPDFGPGTKVEIKTTTPAPRPPTPAPTIASQPLSLRPEACRPAAGGAVHTRGLDFACDIYIWAPLAGTCGVLLLSLVITLYCKRGRKKLLYIFKQPFMRPVQTTQEEDGCSCRFPEEEEGGCELRVKFSRSADAPAYKQGQNQLYNELNLGRREEYDVLDKRRGRDPEMGGKPRRKNPQEGLYNELQKDKMAEAYSEIGMKGERRRGKGHDGLYQGLSTATKDTYDALHMQALPPR

SEQ ID NO: 207262 - protein, 497 aa, Artificial Sequence
  Description of Artificial Sequence: Synthetic Chimeric Antigen Receptor
MALPVTALLLPLALLLHAARPQVQLVQSGAEVKKPGASVKVSCKASGYTFTSYYMHWVRQAPGQGLEWMGIINPSGGSTSYAQKFQGRVTMTRDTSTSTVYMELSSLRSEDTAVYYCARYRLIAVAGDYYYYGMDVWGQGTMVTVSSGGGGSGGGGSGGGGSGGGGSDIQMTQSPSSVSASVGDRVTITCRASQGVGRWLAWYQQKPGTAPKLLIYAASTLQSGVPSRFSGSGSGTDFTLTINNLQPEDFATYYCQQANSFPLTFGGGTRLEIKTTTPAPRPPTPAPTIASQPLSLRPEACRPAAGGAVHTRGLDFACDIYIWAPLAGTCGVLLLSLVITLYCKRGRKKLLYIFKQPFMRPVQTTQEEDGCSCRFPEEEEGGCELRVKFSRSADAPAYKQGQNQLYNELNLGRREEYDVLDKRRGRDPEMGGKPRRKNPQEGLYNELQKDKMAEAYSEIGMKGERRRGKGHDGLYQGLSTATKDTYDALHMQALPPR

SEQ ID NO: 207263 - protein, 494 aa, Artificial Sequence
  Description of Artificial Sequence: Synthetic Chimeric Antigen Receptor
MALPVTALLLPLALLLHAARPQVQLVQSGGGVVQPGRSLRLSCAASGFTFSSYAMHWVRQAPGKGLEWVAVISYDGSNKYYADSVKGRFTISRDNSKNTLYLQMNSLRAEDTAVYYCARWKVSSSSPAFDYWGQGTLVTVSSGGGGSGGGGSGGGGSGGGGSEIVLTQSPATLSLSPGERAILSCRASQSVYTKYLGWYQQKPGQAPRLLIYDASTRATGIPDRFSGSGSGTDFTLTINRLEPEDFAVYYCQHYGGSPLITFGQGTRLEIKTTTPAPRPPTPAPTIASQPLSLRPEACRPAAGGAVHTRGLDFACDIYIWAPLAGTCGVLLLSLVITLYCKRGRKKLLYIFKQPFMRPVQTTQEEDGCSCRFPEEEEGGCELRVKFSRSADAPAYKQGQNQLYNELNLGRREEYDVLDKRRGRDPEMGGKPRRKNPQEGLYNELQKDKMAEAYSEIGMKGERRRGKGHDGLYQGLSTATKDTYDALHMQALPPR

SEQ ID NO: 207264 - protein, 490 aa, Artificial Sequence
  Description of Artificial Sequence: Synthetic Chimeric Antigen Receptor
MALPVTALLLPLALLLHAARPQVQLQQSGAEVKKPGASVKVSCKTSGYPFTGYSLHWVRQAPGQGLEWMGWINPNSGGTNYAQKFQGRVTMTRDTSISTAYMELSRLRSDDTAVYYCARDHYGGNSLFYWGQGTLVTVSSGGGGSGGGGSGGGGSGGGGSDIQLTQSPSSISASVGDTVSITCRASQDSGTWLAWYQQKPGKAPNLLMYDASTLEDGVPSRFSGSASGTEFTLTVNRLQPEDSATYYCQQYNSYPLTFGGGTKVDIKTTTPAPRPPTPAPTIASQPLSLRPEACRPAAGGAVHTRGLDFACDIYIWAPLAGTCGVLLLSLVITLYCKRGRKKLLYIFKQPFMRPVQTTQEEDGCSCRFPEEEEGGCELRVKFSRSADAPAYKQGQNQLYNELNLGRREEYDVLDKRRGRDPEMGGKPRRKNPQEGLYNELQKDKMAEAYSEIGMKGERRRGKGHDGLYQGLSTATKDTYDALHMQALPPR

SEQ ID NO: 207265 - protein, 492 aa, Artificial Sequence
  Description of Artificial Sequence: Synthetic Chimeric Antigen Receptor
MALPVTALLLPLALLLHAARPQVQLVQSGAEVKKPGASVEVSCKASGYTFTSYYMHWVRQAPGQGLEWMGIINPSGGSTGYAQKFQGRVTMTRDTSTSTVHMELSSLRSEDTAVYYCARGGYSSSSDAFDIWGQGTMVTVSSGGGGSGGGGSGGGGSGGGGSDIQMTQSPPSLSASVGDRVTITCRASQDISSALAWYQQKPGTPPKLLIYDASSLESGVPSRFSGSGSGTDFTLTISSLQPEDFATYYCQQFSSYPLTFGGGTRLEIKTTTPAPRPPTPAPTIASQPLSLRPEACRPAAGGAVHTRGLDFACDIYIWAPLAGTCGVLLLSLVITLYCKRGRKKLLYIFKQPFMRPVQTTQEEDGCSCRFPEEEEGGCELRVKFSRSADAPAYKQGQNQLYNELNLGRREEYDVLDKRRGRDPEMGGKPRRKNPQEGLYNELQKDKMAEAYSEIGMKGERRRGKGHDGLYQGLSTATKDTYDALHMQALPPR

SEQ ID NO: 207266 - protein, 356 aa, Artificial Sequence
  Description of Artificial Sequence: Synthetic Chimeric Antigen Receptor
MALPVTALLLPLALLLHAARPPGWFLDSPDRPWNPPTFSPALLVVTEGDNATFTCSFSNTSESFVLNWYRMSPSNQTDKLAAFPEDRSQPGQDCRFRVTQLPNGRDFHMSVVRARRNDSGTYLCGAISLAPKAQIKESLRAELRVTERRAEVPTARPSPSPRPAGQFQTLVTTTPAPRPPTPAPTIASQPLSLRPEACRPAAGGAVHTRGLDFACDIYIWAPLAGTCGVLLLSLVITLYCKRGRKKLLGGGGSGGGGSASRILWHEMWHEGLEEASRLYFGERNVKGMFEVLEPLHAMMERGPQTLKETSFNQAYGRDLMEAQEWCRKYMKSGNVKDLLQAWDLYYHVFRRISKTS

SEQ ID NO: 207267 - protein, 1701 aa, Artificial Sequence
  Description of Artificial Sequence: Synthetic Chimeric Antigen Receptor
MSLPVTALLLPLALLLHAARPDIQMTQTTSSLSASLGDRVTISCRASQDISKYLNWYQQKPDGTVKLLIYHTSRLHSGVPSRFSGSGSGTDYSLTISNLEQEDIATYFCQQGNTLPYTFGGGTKLEITKAGGGGSGGGGSGGGGSGGGGSEVKLQESGPGLVAPSQSLSVTCTVSGVSLPDYGVSWIRQPPRKGLEWLGVIWGSETTYYNSALKSRLTMKDNSKSQVFLKMNSLQTDDTAIYYCAKHYYYGGSYAMDYWGQGTSVTVSSDPTTTPAPRPPTPAPTIASQPLSLRPEACRPAAGGAVHTRGLDFACDIFVWLVWGGVLACYSLLVTVAFIIFWVRRVKFSRSADAPAYQQGQQLYNELNLGRREEYDVLDKRRGRDPEMGGKPRRKNPQEGLYNELQKDMAEAYSEIGMKGERRRGKGHDGLYQGLSTATKDTYDALHMQALPPRRAEGRGSLLTCGDVEENPGPMAVPTQVLGLLLLWLTDARCDIQMTQSPSSLSASVGDRVTITCRASEDIYFNLVWYQQKPGKAPKLLIYDTNRLADGVPSRFSGSGSGTQYTLTISSLQPEDFATYYCQHYKNYPLTFGQGTKLEIKRSGGGGSGGGGSGGGGSGGGGSRSEVQLVESGGGLVQPGGSLRLSCAASGFTLSNYGMHWIRQAPGKGLEWVSSISLNGGSTYYRDSVKGRFTISRDNAKSTLYLQMNSLRAEDTAVYYCAAQDAYTGGYFDYWGQGTLVTVSSMDPAEPKSPDKTHTCPPCPAPPVAGPSVFLFPPKPKDTLMIARTPEVTCVWDVSHEDPEVKFNWYVDGVEVHNAKTKPREEQYNSTYRWSVLTVLHQDWLNGKEYKCKVSNKALPAPIEKTISKAKGQPREPQVYTLPPSRDELTNQVSLTCLVKGFYPSDIAVEWESNGQPENNYKTTPPVLDSDGSFFLYSKLTVDKSRWQQGNVFSCSVMHEALHNHYTQKSLSLSPGKKDPKALIAFLAFLIIVTSIALLWLYKIYDLHKKRSCNLDEQQELVERDDEKQLMNVEPIHADILLETYKRKIADEGRLFLAEFQSIPRVFSKFPIEARKPFNQNKNRYVDILPYDYNRVELSEINGDAGSNYINASYIDGFKEPRKYIAAQGPRDETVDDFWRMIWEQKATVIVMVTRCEEGNRNKCAEYWPSMEEGTRAFGDVWKINQHKRCPDYIIQKLNIVNKKEKATGREVTHIQFTSWPDHGVPEDPHLLLKLRRRVNAFSNFFSGPIWHCSAGVGRTGTYIGIDAMLEGLEAENKVDVYGYWKLRRQRCLMVQVEAQYILIHQALVEYNQFGETEVNLSELHPYLHNMKKRDPPSEPSPLEAEFQRLPSYRSWRTQHIGNQEENKSKNRNSNVIPYDYNRVPLKHELEMSKESEHDSDESSDDDSDSEEPSKYINASFIMSYWKPEVMIAAQGPLKETIGDFWQMIFQRKVKVIVMLTELKHGDQEICAQYWGEGKQTYGDIEVDLDTDKSSTYTLRVFELRHSKRKDSRTVYQYQYTNWSVEQLPAEPKELISMIQWKQKLPQKNSSEGNKHHKSTPLLIHCRDGSQQTGIFCALLNLLESAETEEWDIFQWKALRKARPGMVSTFEQYQFLYDVIASTYPAQNGQVKKNNHQEDKIEFDNEVDKVKQDANCVNPLGAPEKLPEAKEQAEGSEPTSGTEGPEHSVNGPASPALNQGS

SEQ ID NO: 207268 - protein, 378 aa, Artificial Sequence
  Description of Artificial Sequence: Synthetic Chimeric Antigen Receptor
MALPVTALLLPLALLLHAARPGSGSGAQAAEVQLQQSGPELVKPGTSVRISCKTSGYTFTEYTIHWVKQSHGKSLEWIGNINPNNGGTTYNQKFEDKATLTVDKSSSTAYMELRSLTSEDSAVYYCAAGWNFDYWGQGTTVTVSSGGGGSGGGGSGGGGSDIVMTQSHKFMSTSVGDRVSIICKASQDVGTAVDWYQQKPGQSPKLLIYWASTRHTGVPDRFTGSGSGTDFTLTITNVQSEDLADYFCQQYNSYPLTFGAGTMLDLKRAAARSDPASGAGSGSGSAVKEGPPSEHSGISRNAIIFLVLGILVFLILLGIGIYFYWSKCSREVLWHCHLCPSSTEHASASANGHVSYSAVSRENSSSQDPQTEGTRSHG

SEQ ID NO: 207269 - protein, 386 aa, Artificial Sequence
  Description of Artificial Sequence: Synthetic Chimeric Antigen Receptor
MALPVTALLLPLALLLHAARPGSGSGAQAAEVQLQQSGPELVKPGTSVRISCKTSGYTFTEYTIHWVKQSHGKSLEWIGNINPNNGGTTYNQKFEDKATLTVDKSSSTAYMELRSLTSEDSAVYYCAAGWNFDYWGQGTTVTVSSGGGGSGGGGSGGGGSDIVMTQSHKFMSTSVGDRVSIICKASQDVGTAVDWYQQKPGQSPKLLIYWASTRHTGVPDRFTGSGSGTDFTLTITNVQSEDLADYFCQQYNSYPLTFGAGTMLDLKRAAARSDPASGAGSGSGSAVQAPSSSPMGIIVAVVTGIAVAAIVAAVVALIYCRKKRISALPGYPECREMGETLPEKPANPTNPDEADKVGAENTITYSLLMHPDALEEPDDQNRISHG

SEQ ID NO: 207270 - protein, 404 aa, Artificial Sequence
  Description of Artificial Sequence: Synthetic Chimeric Antigen Receptor
MALPVTALLLPLALLLHAARPGSGSGAQAAEVQLQQSGPELVKPGTSVRISCKTSGYTFTEYTIHWVKQSHGKSLEWIGNINPNNGGTTYNQKFEDKATLTVDKSSSTAYMELRSLTSEDSAVYYCAAGWNFDYWGQGTTVTVSSGGGGSGGGGSGGGGSDIVMTQSHKFMSTSVGDRVSIICKASQDVGTAVDWYQQKPGQSPKLLIYWASTRHTGVPDRFTGSGSGTDFTLTITNVQSEDLADYFCQQYNSYPLTFGAGTMLDLKRAAARSDPASGAGSGSGSASFRALPHAWSDPSDPLPVSVTGNSRYLHALIGTSVVIIPFAILLFFLLHRWCANKKNAVVMDQEPAGNRTVNREDSDEQDPQEVTYAQLNHCVFTQRKITRPSQRPKTPPTDTSVSHG

SEQ ID NO: 207271 - protein, 405 aa, Artificial Sequence
  Description of Artificial Sequence: Synthetic Chimeric Antigen Receptor
MALPVTALLLPLALLLHAEVQLQQSGPELVKPGTSVRISCKTSGYTFTEYTIHWVKQSHGKSLEWIGNINPNNGGTTYNQKFEDKATLTVDKSSSTAYMELRSLTSEDSAVYYCAAGWNFDYWGQGTTVTVSSGGGGSGGGGSGGGGSDIVMTQSHKFMSTSVGDRVSIICKASQDVGTAVDWYQQKPGQSPKLLIYWASTRHTGVPDRFTGSGSGTDFTLTITNVQSEDLADYFCQQYNSYPLTFGAGTMLDLKRAAATERRAEVPTAHPSPSPRPAGQFQTLVVGVVGGLLGSLVLLVWVLAVICSRAARGTIGARRTGQPLKEDPSAVPVFSVDYGELDFQWREKTPEPPVPCVPEQTEYATIVFPSGMGTSSPARRGSADGPRSAQPLRPEDGHCSWPLSH

SEQ ID NO: 207272 - protein, 409 aa, Artificial Sequence
  Description of Artificial Sequence: Synthetic Chimeric Antigen Receptor
MALPVTALLLPLALLLHAARPGSGSGAQAAEVQLQQSGPELVKPGTSVRISCKTSGYTFTEYTIHWVKQSHGKSLEWIGNINPNNGGTTYNQKFEDKATLTVDKSSSTAYMELRSLTSEDSAVYYCAAGWNFDYWGQGTTVTVSSGGGGSGGGGSGGGGSDIVMTQSHKFMSTSVGDRVSIICKASQDVGTAVDWYQQKPGQSPKLLIYWASTRHTGVPDRFTGSGSGTDFTLTITNVQSEDLADYFCQQYNSYPLTFGAGTMLDLKRAAARSDPASGAGSGSGSALFVHWKPEGRAGGVLGAVWGASITTLVFLCVCFIFRVKTRRKKAAQPVQNTDDVNPVMVSGSRGHQHQFQTGIVSDHPAEAGPISEDEQELHYAVLHFHKVQPQEPKVTDTEYSEIKIHKSHG

SEQ ID NO: 207273 - protein, 410 aa, Artificial Sequence
  Description of Artificial Sequence: Synthetic Chimeric Antigen Receptor
MALPVTALLLPLALLLHAARPGSGSGAQAAEVQLQQSGPELVKPGTSVRISCKTSGYTFTEYTIHWVKQSHGKSLEWIGNINPNNGGTTYNQKFEDKATLTVDKSSSTAYMELRSLTSEDSAVYYCAAGWNFDYWGQGTTVTVSSGGGGSGGGGSGGGGSDIVMTQSHKFMSTSVGDRVSIICKASQDVGTAVDWYQQKPGQSPKLLIYWASTRHTGVPDRFTGSGSGTDFTLTITNVQSEDLADYFCQQYNSYPLTFGAGTMLDLKRAAARSDPASGAGSGSGSAGPDGYRRDLMTAGVLWGLFGVLGFTGVALLLYALFHKISGESSATNEPRGASRPNPQEFTYSSPTPDMEELQPVYVNVGSVDVDVVYSQVWSMQQPESSANIRTLLENKDSQVIYSSVKKSSHG

SEQ ID NO: 207274 - protein, 412 aa, Artificial Sequence
  Description of Artificial Sequence: Synthetic Chimeric Antigen Receptor
MALPVTALLLPLALLLHAARPGSGSGAQAAEVQLQQSGPELVKPGTSVRISCKTSGYTFTEYTIHWVKQSHGKSLEWIGNINPNNGGTTYNQKFEDKATLTVDKSSSTAYMELRSLTSEDSAVYYCAAGWNFDYWGQGTTVTVSSGGGGSGGGGSGGGGSDIVMTQSHKFMSTSVGDRVSIICKASQDVGTAVDWYQQKPGQSPKLLIYWASTRHTGVPDRFTGSGSGTDFTLTITNVQSEDLADYFCQQYNSYPLTFGAGTMLDLKRAAARSDPASGAGSGSGSAPGHIRLYVVEKENLPVFPVWVVVGIVTAVVLGLTLLISMILAVLYRRKNSKRDYTGCSTSESLSPVKQAPRKSPSDTEGLVKSLPSGSHQGPVIYAQLDHSGGHHSDKINKSESVVYADIRKNSHG

SEQ ID NO: 207275 - protein, 416 aa, Artificial Sequence
  Description of Artificial Sequence: Synthetic Chimeric Antigen Receptor
MALPVTALLLPLALLLHAARPGSGSGAQAAEVQLQQSGPELVKPGTSVRISCKTSGYTFTEYTIHWVKQSHGKSLEWIGNINPNNGGTTYNQKFEDKATLTVDKSSSTAYMELRSLTSEDSAVYYCAAGWNFDYWGQGTTVTVSSGGGGSGGGGSGGGGSDIVMTQSHKFMSTSVGDRVSIICKASQDVGTAVDWYQQKPGQSPKLLIYWASTRHTGVPDRFTGSGSGTDFTLTITNVQSEDLADYFCQQYNSYPLTFGAGTMLDLKRAAARSDPASGAGSGSGSALQSKATSGVTQGVVGGAGATALVFLSFCVIFVVVRSCRKKSARPAAGVGDTGIEDANAVRGSASQGPLTEPWAEDSPPDQPPPASARSSVGEGELQYASLSFQMVKPWDSRGQEATDTEYSEIKIHRSHG

SEQ ID NO: 207276 - protein, 419 aa, Artificial Sequence
  Description of Artificial Sequence: Synthetic Chimeric Antigen Receptor
MALPVTALLLPLALLLHAARPGSGSGAQAAEVQLQQSGPELVKPGTSVRISCKTSGYTFTEYTIHWVKQSHGKSLEWIGNINPNNGGTTYNQKFEDKATLTVDKSSSTAYMELRSLTSEDSAVYYCAAGWNFDYWGQGTTVTVSSGGGGSGGGGSGGGGSDIVMTQSHKFMSTSVGDRVSIICKASQDVGTAVDWYQQKPGQSPKLLIYWASTRHTGVPDRFTGSGSGTDFTLTITNVQSEDLADYFCQQYNSYPLTFGAGTMLDLKRAAARSDPASGAGSGSGSAMPSTGGDSCPFCLKLLLPGLLLLLVVIILILAFWVLPKYKTRKAMRNNVPRDRGDTAMEVGIYANILEKQAKEESVPEVGSRPCVSTAQDEAKHSQELQYATPVFQEVAPREQEACDSYKSGYVYSELNFSHG

SEQ ID NO: 207277 - protein, 420 aa, Artificial Sequence
  Description of Artificial Sequence: Synthetic Chimeric Antigen Receptor
MALPVTALLLPLALLLHAARPGSGSGAQAAEVQLQQSGPELVKPGTSVRISCKTSGYTFTEYTIHWVKQSHGKSLEWIGNINPNNGGTTYNQKFEDKATLTVDKSSSTAYMELRSLTSEDSAVYYCAAGWNFDYWGQGTTVTVSSGGGGSGGGGSGGGGSDIVMTQSHKFMSTSVGDRVSIICKASQDVGTAVDWYQQKPGQSPKLLIYWASTRHTGVPDRFTGSGSGTDFTLTITNVQSEDLADYFCQQYNSYPLTFGAGTMLDLKRAAARSDPASGAGSGSGSALQQEYTGKMRPVSGVLLGAVGGAGATALVFLSFCVIFIVVRSCRKKSARPAADVGDIGMKDANTIRGSASQGNLTESWADDNPRHHGLAAHSSGEEREIQYAPLSFHKGEPQDLSGQEATNNEYSEIKIPKSHG

SEQ ID NO: 207278 - protein, 422 aa, Artificial Sequence
  Description of Artificial Sequence: Synthetic Chimeric Antigen Receptor
MALPVTALLLPLALLLHAARPGSGSGAQAAEVQLQQSGPELVKPGTSVRISCKTSGYTFTEYTIHWVKQSHGKSLEWIGNINPNNGGTTYNQKFEDKATLTVDKSSSTAYMELRSLTSEDSAVYYCAAGWNFDYWGQGTTVTVSSGGGGSGGGGSGGGGSDIVMTQSHKFMSTSVGDRVSIICKASQDVGTAVDWYQQKPGQSPKLLIYWASTRHTGVPDRFTGSGSGTDFTLTITNVQSEDLADYFCQQYNSYPLTFGAGTMLDLKRAAARSDPASGAGSGSGSALQNEYTGKMRPISGVTLGAFGGAGATALVFLYFCIIFVVVRSCRKKSARPAVGVGDTGMEDANAVRGSASQGPLIESPADDSPPHHAPPALATPSPEEGEIQYASLSFHKARPQYPQEQEAIGYEYSEINIPKSHG

SEQ ID NO: 207279 - protein, 425 aa, Artificial Sequence
  Description of Artificial Sequence: Synthetic Chimeric Antigen Receptor
MALPVTALLLPLALLLHAARPGSGSGAQAAEVQLQQSGPELVKPGTSVRISCKTSGYTFTEYTIHWVKQSHGKSLEWIGNINPNNGGTTYNQKFEDKATLTVDKSSSTAYMELRSLTSEDSAVYYCAAGWNFDYWGQGTTVTVSSGGGGSGGGGSGGGGSDIVMTQSHKFMSTSVGDRVSIICKASQDVGTAVDWYQQKPGQSPKLLIYWASTRHTGVPDRFTGSGSGTDFTLTITNVQSEDLADYFCQQYNSYPLTFGAGTMLDLKRAAARSDPASGAGSGSGSALNVTYVPQNPTTGIFPGDGSGKQETRAGVVHGAIGGAGVTALLALCLCLIFFIVKTHRRKAARTAVGRNDTHPTTGSASPKHQKKSKLHGPTETSSCSGAAPTVEMDEELHYASLNFHGMNPSKDTSTEYSEVRTQSHG

SEQ ID NO: 207280 - protein, 425 aa, Artificial Sequence
  Description of Artificial Sequence: Synthetic Chimeric Antigen Receptor
MALPVTALLLPLALLLHAARPGSGSGAQAAEVQLQQSGPELVKPGTSVRISCKTSGYTFTEYTIHWVKQSHGKSLEWIGNINPNNGGTTYNQKFEDKATLTVDKSSSTAYMELRSLTSEDSAVYYCAAGWNFDYWGQGTTVTVSSGGGGSGGGGSGGGGSDIVMTQSHKFMSTSVGDRVSIICKASQDVGTAVDWYQQKPGQSPKLLIYWASTRHTGVPDRFTGSGSGTDFTLTITNVQSEDLADYFCQQYNSYPLTFGAGTMLDLKRAAARSDPASGAGSGSGSAPYEWSNSSDPLLVSVTGNPSNSWPSPTEPSSETGNPRHLHVLIGTSVVIILFILLLFFLLHRWCCNKKNAVVMDQEPAGNRTVNREDSDEQDPQEVTYAQLNHCVFTQRKITRPSQRPKTPPTDIIVYTELPNAEPSHG

SEQ ID NO: 207281 - protein, 427 aa, Artificial Sequence
  Description of Artificial Sequence: Synthetic Chimeric Antigen Receptor
MALPVTALLLPLALLLHAARPGSGSGAQAAEVQLQQSGPELVKPGTSVRISCKTSGYTFTEYTIHWVKQSHGKSLEWIGNINPNNGGTTYNQKFEDKATLTVDKSSSTAYMELRSLTSEDSAVYYCAAGWNFDYWGQGTTVTVSSGGGGSGGGGSGGGGSDIVMTQSHKFMSTSVGDRVSIICKASQDVGTAVDWYQQKPGQSPKLLIYWASTRHTGVPDRFTGSGSGTDFTLTITNVQSEDLADYFCQQYNSYPLTFGAGTMLDLKRAAARSDPASGAGSGSGSALNFTVPTGARSNHLTSGVIEGLLSTLGPATVALLFCYGLKRKIGRRSARDPLRSLPSPLPQEFTYLNSPTPGQLQPIYENVNVVSGDEVYSLAYYNQPEQESVAAETLGTHMEDKVSLDIYSRLRKANITDVDYEDAMSHG

SEQ ID NO: 207282 - protein, 430 aa, Artificial Sequence
  Description of Artificial Sequence: Synthetic Chimeric Antigen Receptor
MALPVTALLLPLALLLHAARPGSGSGAQAAEVQLQQSGPELVKPGTSVRISCKTSGYTFTEYTIHWVKQSHGKSLEWIGNINPNNGGTTYNQKFEDKATLTVDKSSSTAYMELRSLTSEDSAVYYCAAGWNFDYWGQGTTVTVSSGGGGSGGGGSGGGGSDIVMTQSHKFMSTSVGDRVSIICKASQDVGTAVDWYQQKPGQSPKLLIYWASTRHTGVPDRFTGSGSGTDFTLTITNVQSEDLADYFCQQYNSYPLTFGAGTMLDLKRAAARSDPASGAGSGSGSAVTVRETPGNRDGLVAAGATGGLLSALLLAVALLFHCWRRRKSGVGFLGDETRLPPAPGPGESSHSICPAQVELQSLYVDVHPKKGDLVYSEIQTTQLGEEEEANTSRTLLEDKDVSVVYSEVKTQHPDNSAGKISSKDEESSHG

SEQ ID NO: 207283 - protein, 432 aa, Artificial Sequence
  Description of Artificial Sequence: Synthetic Chimeric Antigen Receptor
MALPVTALLLPLALLLHAARPGSGSGAQAAEVQLQQSGPELVKPGTSVRISCKTSGYTFTEYTIHWVKQSHGKSLEWIGNINPNNGGTTYNQKFEDKATLTVDKSSSTAYMELRSLTSEDSAVYYCAAGWNFDYWGQGTTVTVSSGGGGSGGGGSGGGGSDIVMTQSHKFMSTSVGDRVSIICKASQDVGTAVDWYQQKPGQSPKLLIYWASTRHTGVPDRFTGSGSGTDFTLTITNVQSEDLADYFCQQYNSYPLTFGAGTMLDLKRAAARSDPASGAGSGSGSALYITGLTANRSGPFATGVAGGLLSIAGLAAGALLLYCWLSRKAGRKPASDPARSPPDSDSQEPTYHNVPAWEELQPVYTNANPRGENVVYSEVRIIQEKKKHAVASDPRHLRNKGSPIIYSEVKVASTPVSGSLFLASSAPHRSHG

SEQ ID NO: 207284 - protein, 432 aa, Artificial Sequence
  Description of Artificial Sequence: Synthetic Chimeric Antigen Receptor
MALPVTALLLPLALLLHAARPGSGSGAQAAEVQLQQSGPELVKPGTSVRISCKTSGYTFTEYTIHWVKQSHGKSLEWIGNINPNNGGTTYNQKFEDKATLTVDKSSSTAYMELRSLTSEDSAVYYCAAGWNFDYWGQGTTVTVSSGGGGSGGGGSGGGGSDIVMTQSHKFMSTSVGDRVSIICKASQDVGTAVDWYQQKPGQSPKLLIYWASTRHTGVPDRFTGSGSGTDFTLTITNVQSEDLADYFCQQYNSYPLTFGAGTMLDLKRAAARSDPASGAGSGSGSAPYEWSKSSDPLLVSVTGNPSNSWPSPTEPSSKTGNPRHLHILIGTSVVIILFILLFFLLHRWCSNKKNAAVMDQESAGNRTANSEDSDEQDPQEVTYTQLNHCVFTQRKITRPSQRPKTPPTDIIVYTELPNAESRSKVVSCPSHG

SEQ ID NO: 207285 - protein, 432 aa, Artificial Sequence
  Description of Artificial Sequence: Synthetic Chimeric Antigen Receptor
MALPVTALLLPLALLLHAARPGSGSGAQAAEVQLQQSGPELVKPGTSVRISCKTSGYTFTEYTIHWVKQSHGKSLEWIGNINPNNGGTTYNQKFEDKATLTVDKSSSTAYMELRSLTSEDSAVYYCAAGWNFDYWGQGTTVTVSSGGGGSGGGGSGGGGSDIVMTQSHKFMSTSVGDRVSIICKASQDVGTAVDWYQQKPGQSPKLLIYWASTRHTGVPDRFTGSGSGTDFTLTITNVQSEDLADYFCQQYNSYPLTFGAGTMLDLKRAAARSDPASGAGSGSGSAPYEWSNSSDPLLVSVIGNPSNSWPSPTEPSSKTGNPRHLHILIGTSVVIILFILLFFLLHRWCSNKKNAAVMDQESAGNRTANSEDSDEQDPQEVTYTQLNHCVFTQRKITRPSQRPKTPPTDIIVYAELPNAESRSKVVSCPSHG

SEQ ID NO: 207286 - protein, 432 aa, Artificial Sequence
  Description of Artificial Sequence: Synthetic Chimeric Antigen Receptor
MALPVTALLLPLALLLHAARPGSGSGAQAAEVQLQQSGPELVKPGTSVRISCKTSGYTFTEYTIHWVKQSHGKSLEWIGNINPNNGGTTYNQKFEDKATLTVDKSSSTAYMELRSLTSEDSAVYYCAAGWNFDYWGQGTTVTVSSGGGGSGGGGSGGGGSDIVMTQSHKFMSTSVGDRVSIICKASQDVGTAVDWYQQKPGQSPKLLIYWASTRHTGVPDRFTGSGSGTDFTLTITNVQSEDLADYFCQQYNSYPLTFGAGTMLDLKRAAARSDPASGAGSGSGSAERRAEVPTAHPSPSPRPAGQFQTLVVGVVGGLLGSLVLLVWVLAVICSRAARGTIGARRTGQPLKEDPSAVPVFSVDYGELDFQWREKTPEPPVPCVPEQTEYATIVFPSGMGTSSPARRGSADGPRSAQPLRPEDGHCSWPLSHG

SEQ ID NO: 207287 - protein, 433 aa, Artificial Sequence
  Description of Artificial Sequence: Synthetic Chimeric Antigen Receptor
MALPVTALLLPLALLLHAARPGSGSGAQAAEVQLQQSGPELVKPGTSVRISCKTSGYTFTEYTIHWVKQSHGKSLEWIGNINPNNGGTTYNQKFEDKATLTVDKSSSTAYMELRSLTSEDSAVYYCAAGWNFDYWGQGTTVTVSSGGGGSGGGGSGGGGSDIVMTQSHKFMSTSVGDRVSIICKASQDVGTAVDWYQQKPGQSPKLLIYWASTRHTGVPDRFTGSGSGTDFTLTITNVQSEDLADYFCQQYNSYPLTFGAGTMLDLKRAAARSDPASGAGSGSGSAPYEWSDPSDPLLVSVTGNPSSSWPSPTEPSSKSGNPRHLHILIGTSVVIILFILLLFFLLHLWCSNKKNAAVMDQEPAGNRTANSEDSDEQDPEEVTYAQLDHCVFTQRKITRPSQRPKTPPTDTILYTELPNAKPRSKVVSCPSHG

SEQ ID NO: 207288 - protein, 434 aa, Artificial Sequence
  Description of Artificial Sequence: Synthetic Chimeric Antigen Receptor
QVQLQQSGAELVRPGASVTLSCKASGYTFSDYEMHWVIQTPVHGLEWIGAIDPETGGTAYNQKFKGKAILTADKSSSTAYMELRSLTSEDSAVYYCTGYYDYDSFTYWGQGTLVTVSAGGGGSGGGGSGGGGSDIVMTQSQKIMSTTVGDRVSITCKASQNVDAAVAWYQQKPGQSPKLLIYSASNRYTGVPDRFTGSGSGTDFTLTISNMQSEDLADYFCQQYDIYPYTFGGGTKLEIKGLAVSTISSFFPPGYQIYIWAPLAGTCGVLLLSLVITLYCKRGRKKLLYIFKQPFMRPVQTTQEEDGCSCRFPEEEEGGCELRVKFSRSADAPAYQQGQNQLYNELNLGRREEYDVLDKRRGRDPEMGGKPRRKNPQEGLYNELQKDKMAEAYSEIGMKGERRRGKGHDGLYQGLSTATKDTYDALHMQALPPR

SEQ ID NO: 207289 - protein, 436 aa, Artificial Sequence
  Description of Artificial Sequence: Synthetic Chimeric Antigen Receptor
MALPVTALLLPLALLLHAARPGSGSGAQAAEVQLQQSGPELVKPGTSVRISCKTSGYTFTEYTIHWVKQSHGKSLEWIGNINPNNGGTTYNQKFEDKATLTVDKSSSTAYMELRSLTSEDSAVYYCAAGWNFDYWGQGTTVTVSSGGGGSGGGGSGGGGSDIVMTQSHKFMSTSVGDRVSIICKASQDVGTAVDWYQQKPGQSPKLLIYWASTRHTGVPDRFTGSGSGTDFTLTITNVQSEDLADYFCQQYNSYPLTFGAGTMLDLKRAAARSDPASGAGSGSGSAVRVILAPWKKGLIAVVIIGVIIALLIIAAKCYFLRKAKAKQMPVEMSRPAVPLLNSNNEKMSDPNMEANSHYGHNDDVGNHAMKPINDNKEPLNSDVQYTEVQVSSAESHKDLGKKDTETVYSEVRKAVPDAVESRYSRTEGSLDGTSHG

SEQ ID NO: 207290 - protein, 442 aa, Artificial Sequence
  Description of Artificial Sequence: Synthetic Chimeric Antigen Receptor
MALPVTALLLPLALLLHAARPGSGSGAQAAEVQLQQSGPELVKPGTSVRISCKTSGYTFTEYTIHWVKQSHGKSLEWIGNINPNNGGTTYNQKFEDKATLTVDKSSSTAYMELRSLTSEDSAVYYCAAGWNFDYWGQGTTVTVSSGGGGSGGGGSGGGGSDIVMTQSHKFMSTSVGDRVSIICKASQDVGTAVDWYQQKPGQSPKLLIYWASTRHTGVPDRFTGSGSGTDFTLTITNVQSEDLADYFCQQYNSYPLTFGAGTMLDLKRAAARSDPASGAGSGSGSAQAVTTTTQRPSSMTTTWRLSSTTTTTGLRVTQGKRRSDSWHISLETAVGVAVAVTVLGIMILGLICLLRWRRRKGQQRTKATTPAREPFQNTEEPYENIRNEGQNTDPKLNPKDDGIVYASLALSSSTSPKAPPSHRPLKSPQNETLYSVLKASHG

SEQ ID NO: 207291 - protein, 444 aa, Artificial Sequence
  Description of Artificial Sequence: Synthetic Chimeric Antigen Receptor
MALPVTALLLPLALLLHAARPGSGSGAQAAEVQLQQSGPELVKPGTSVRISCKTSGYTFTEYTIHWVKQSHGKSLEWIGNINPNNGGTTYNQKFEDKATLTVDKSSSTAYMELRSLTSEDSAVYYCAAGWNFDYWGQGTTVTVSSGGGGSGGGGSGGGGSDIVMTQSHKFMSTSVGDRVSIICKASQDVGTAVDWYQQKPGQSPKLLIYWASTRHTGVPDRFTGSGSGTDFTLTITNVQSEDLADYFCQQYNSYPLTFGAGTMLDLKRAAARSDPASGAGSGSGSAPCVWSNSSDPLLVSVTGNPSSSWPSPTEPSSKSGICRHLHVLIGTSVVIFLFILLLFFLLYRWCSNKKNAAVMDQEPAGDRTVNRQDSDEQDPQEVTYAQLDHCVFIQRKISRPSQRPKTPLTDTSVYTELPNAEPRSKVVSCPRAPQSGLEGVFSHG

SEQ ID NO: 207292 - protein, 444 aa, Artificial Sequence
  Description of Artificial Sequence: Synthetic Chimeric Antigen Receptor
MALPVTALLLPLALLLHAARPGSGSGAQAAEVQLQQSGPELVKPGTSVRISCKTSGYTFTEYTIHWVKQSHGKSLEWIGNINPNNGGTTYNQKFEDKATLTVDKSSSTAYMELRSLTSEDSAVYYCAAGWNFDYWGQGTTVTVSSGGGGSGGGGSGGGGSDIVMTQSHKFMSTSVGDRVSIICKASQDVGTAVDWYQQKPGQSPKLLIYWASTRHTGVPDRFTGSGSGTDFTLTITNVQSEDLADYFCQQYNSYPLTFGAGTMLDLKRAAARSDPASGAGSGSGSALQNEGTGTSRPVSQVTLAAVGGAGATALAFLSFCIIFIIVRSCRKKSARPAAGVGDTGMEDAKAIRGSASQGPLTESWKDGNPLKKPPPAVAPSSGEEGELHYATLSFHKVKPQDPQGQEATDSEYSEIKIHKRETAETQACLRNHNPSSKEVRGSHG

SEQ ID NO: 207293 - protein, 460 aa, Artificial Sequence
  Description of Artificial Sequence: Synthetic Chimeric Antigen Receptor
MALPVTALLLPLALLLHAARPGSGSGAQAAEVQLQQSGPELVKPGTSVRISCKTSGYTFTEYTIHWVKQSHGKSLEWIGNINPNNGGTTYNQKFEDKATLTVDKSSSTAYMELRSLTSEDSAVYYCAAGWNFDYWGQGTTVTVSSGGGGSGGGGSGGGGSDIVMTQSHKFMSTSVGDRVSIICKASQDVGTAVDWYQQKPGQSPKLLIYWASTRHTGVPDRFTGSGSGTDFTLTITNVQSEDLADYFCQQYNSYPLTFGAGTMLDLKRAAARSDPASGAGSGSGSAGTSRNRTGLTAAGITGLVLSILVLAAAAALLHYARARRKPGGLSATGTSSHSPSECQEPSSSRPSRIDPQEPTHSKPLAPMELEPMYSNANPGDSNPIYSQIWSIQHTKENSANCPMMHQEHEELTVLYSELKKTHPDDSAGEASSRGRAHEEDDEENYENVPRVLLASDHSHG

SEQ ID NO: 207294 - protein, 461 aa, Artificial Sequence
  Description of Artificial Sequence: Synthetic Chimeric Antigen Receptor
MALPVTALLLPLALLLHAARPGSGSGAQAAEVQLQQSGPELVKPGTSVRISCKTSGYTFTEYTIHWVKQSHGKSLEWIGNINPNNGGTTYNQKFEDKATLTVDKSSSTAYMELRSLTSEDSAVYYCAAGWNFDYWGQGTTVTVSSGGGGSGGGGSGGGGSDIVMTQSHKFMSTSVGDRVSIICKASQDVGTAVDWYQQKPGQSPKLLIYWASTRHTGVPDRFTGSGSGTDFTLTITNVQSEDLADYFCQQYNSYPLTFGAGTMLDLKRAAARSDPASGAGSGSGSAGPSGDPSLSPTGSTPTPGPEDQPLTPTGLDPQSGLGRHLGVVTGVSVAFVLLLFLLLFLLLRHRHQSKHRTSAHFYRPAGAAGPEPKDQGLQKRASPVADIQEEILNAAVKDTQPKDGVEMDARAAASEAPQDVTYAQLHSLTLRREATEPPPSQEREPPAEPSIYAPLAIHSHG

SEQ ID NO: 207295 - protein, 464 aa, Artificial Sequence
  Description of Artificial Sequence: Synthetic Chimeric Antigen Receptor
MALPVTALLLPLALLLHAARPGSGSGAQAAEVQLQQSGPELVKPGTSVRISCKTSGYTFTEYTIHWVKQSHGKSLEWIGNINPNNGGTTYNQKFEDKATLTVDKSSSTAYMELRSLTSEDSAVYYCAAGWNFDYWGQGTTVTVSSGGGGSGGGGSGGGGSDIVMTQSHKFMSTSVGDRVSIICKASQDVGTAVDWYQQKPGQSPKLLIYWASTRHTGVPDRFTGSGSGTDFTLTITNVQSEDLADYFCQQYNSYPLTFGAGTMLDLKRAAARSDPASGAGSGSGSAPYEWSDASDPLPVSVTGNPSSSWPSPTEPSFKTGIARHLHAVIRYSVAIILFTILPFFLLHRWCSKKKDAAVMNQEPAGHRTVNREDSDEQDPQEVTYAQLDHCIFTQRKITGPSQRSKRPSTDTSVCIELPNAEPRALSPAHEHHSQALMGSSRETTALSQTQLASSHVPAAGISHG

SEQ ID NO: 207296 - protein, 464 aa, Artificial Sequence
  Description of Artificial Sequence: Synthetic Chimeric Antigen Receptor
MALPVTALLLPLALLLHAARPGSGSGAQAAEVQLQQSGPELVKPGTSVRISCKTSGYTFTEYTIHWVKQSHGKSLEWIGNINPNNGGTTYNQKFEDKATLTVDKSSSTAYMELRSLTSEDSAVYYCAAGWNFDYWGQGTTVTVSSGGGGSGGGGSGGGGSDIVMTQSHKFMSTSVGDRVSIICKASQDVGTAVDWYQQKPGQSPKLLIYWASTRHTGVPDRFTGSGSGTDFTLTITNVQSEDLADYFCQQYNSYPLTFGAGTMLDLKRAAARSDPASGAGSGSGSAPYEWSDPSDPLLVSVTGNSSSSSSSPTEPSSKTGIRRHLHILIGTSVAIILFIILFFFLLHCCCSNKKNAAVMDQEPAGDRTVNREDSDDQDPQEVTYAQLDHCVFTQTKITSPSQRPKTPPTDTTMYMELPNAKPRSLSPAHKHHSQALRGSSRETTALSQNRVASSHVPAAGISHG

SEQ ID NO: 207297 - protein, 468 aa, Artificial Sequence
  Description of Artificial Sequence: Synthetic Chimeric Antigen Receptor
MALPVTALLLPLALLLHAARPGSGSGAQAAEVQLQQSGPELVKPGTSVRISCKTSGYTFTEYTIHWVKQSHGKSLEWIGNINPNNGGTTYNQKFEDKATLTVDKSSSTAYMELRSLTSEDSAVYYCAAGWNFDYWGQGTTVTVSSGGGGSGGGGSGGGGSDIVMTQSHKFMSTSVGDRVSIICKASQDVGTAVDWYQQKPGQSPKLLIYWASTRHTGVPDRFTGSGSGTDFTLTITNVQSEDLADYFCQQYNSYPLTFGAGTMLDLKRAAARSDPASGAGSGSGSAGPSMGSSPPPTGPISTPAGPEDQPLTPTGSDPQSGLGRHLGVVIGILVAVVLLLLLLLLLFLILRHRRQGKHWTSTQRKADFQHPAGAVGPEPTDRGLQWRSSPAADAQEENLYAAVKDTQPEDGVEMDTRAAASEAPQDVTYAQLHSLTLRRKATEPPPSQEREPPAEPSIYATLAIHSHG

SEQ ID NO: 207298 - protein, 495 aa, Artificial Sequence
  Description of Artificial Sequence: Synthetic Chimeric Antigen Receptor
MALPVTALLLPLALLLHAARPGSGSGAQAAEVQLQQSGPELVKPGTSVRISCKTSGYTFTEYTIHWVKQSHGKSLEWIGNINPNNGGTTYNQKFEDKATLTVDKSSSTAYMELRSLTSEDSAVYYCAAGWNFDYWGQGTTVTVSSGGGGSGGGGSGGGGSDIVMTQSHKFMSTSVGDRVSIICKASQDVGTAVDWYQQKPGQSPKLLIYWASTRHTGVPDRFTGSGSGTDFTLTITNVQSEDLADYFCQQYNSYPLTFGAGTMLDLKRAAARSDPASGAGSGSGSAKNESAASSTGKTPAAEETVTTILGMLASPYHYLIIIVVLVIILAVVVVGFSCRKKFISYLKGICSGGGGGPERVHRVLFRRRSCPSRVPGAEDNARNETLSNRYLQPTQVSEQEIQGQELAELTGVTVELPEEPQRLLEQAEAEGCQRRRLLVPVNDADSADISTLLDASATLEEGHAKETIQDQLVGSEKLFYEEDEAGSATSCLSHG

SEQ ID NO: 207299 - protein, 501 aa, Artificial Sequence
  Description of Artificial Sequence: Synthetic Chimeric Antigen Receptor
MALPVTALLLPLALLLHAARPGSGSGAQAAEVQLQQSGPELVKPGTSVRISCKTSGYTFTEYTIHWVKQSHGKSLEWIGNINPNNGGTTYNQKFEDKATLTVDKSSSTAYMELRSLTSEDSAVYYCAAGWNFDYWGQGTTVTVSSGGGGSGGGGSGGGGSDIVMTQSHKFMSTSVGDRVSIICKASQDVGTAVDWYQQKPGQSPKLLIYWASTRHTGVPDRFTGSGSGTDFTLTITNVQSEDLADYFCQQYNSYPLTFGAGTMLDLKRAAARSDPASGAGSGSGSAGHSGGSSLPPTGPPSTPGLGRYLEVLIGVSVAFVLLLFLLLFLLLRRQRHSKHRTSDQRKTDFQRPAGAAETEPKDRGLLRRSSPAADVQEENLYAAVKDTQSEDRVELDSQSPHDEDPQAVTYAPVKHSSPRREMASPPSSLSGEFLDTKDRQVEEDRQMDTEAAASEASQDVTYAQLHSLTLRRKATEPPPSQEGEPPAEPSIYATLAIHSHG

SEQ ID NO: 207300 - protein, 510 aa, Artificial Sequence
  Description of Artificial Sequence: Synthetic Chimeric Antigen Receptor
MALPVTALLLPLALLLHAARPGSGSGAQAAEVQLQQSGPELVKPGTSVRISCKTSGYTFTEYTIHWVKQSHGKSLEWIGNINPNNGGTTYNQKFEDKATLTVDKSSSTAYMELRSLTSEDSAVYYCAAGWNFDYWGQGTTVTVSSGGGGSGGGGSGGGGSDIVMTQSHKFMSTSVGDRVSIICKASQDVGTAVDWYQQKPGQSPKLLIYWASTRHTGVPDRFTGSGSGTDFTLTITNVQSEDLADYFCQQYNSYPLTFGAGTMLDLKRAAARSDPASGAGSGSGSAVYSLPQLLGPSCSWEAEGLHCRCSFRAWPAPSLCWRLEEKPLEGNSSQGSFKVNSSSPGPWANSSLILHGGLNSDLKVSCKAWNIYGSQSGSVLLLQGRSNLGTGVVPAALGGAGVMALLCICLCLIFFLIVKARRKQAAGRPEKMDDEDPIMGTITSGSRKKPWPDSPGDQASPPGDAPPLEEQKELHYASLSFSEMKSREPKDQEAPSTTEYSEIKTSKSHG

SEQ ID NO: 207301 - protein, 519 aa, Artificial Sequence
  Description of Artificial Sequence: Synthetic Chimeric Antigen Receptor
MALPVTALLLPLALLLHAARPGSGSGAQAAEVQLQQSGPELVKPGTSVRISCKTSGYTFTEYTIHWVKQSHGKSLEWIGNINPNNGGTTYNQKFEDKATLTVDKSSSTAYMELRSLTSEDSAVYYCAAGWNFDYWGQGTTVTVSSGGGGSGGGGSGGGGSDIVMTQSHKFMSTSVGDRVSIICKASQDVGTAVDWYQQKPGQSPKLLIYWASTRHTGVPDRFTGSGSGTDFTLTITNVQSEDLADYFCQQYNSYPLTFGAGTMLDLKRAAARSDPASGAGSGSGSAGSLEGPRPSPTRSVSTAAGPEDQPLMPTGSVPHSGLRRHWEVLIGVLVVSILLLSLLLFLLLQHWRQGKHRTLAQRQADFQRPPGAAEPEPKDGGLQRRSSPAADVQGENFCAAVKNTQPEDGVEMDTRQSPHDEDPQAVTYAKVKHSRPRREMASPPSPLSGEFLDTKDRQAEEDRQMDTEAAASEAPQDVTYAQLHSFTLRQKATEPPPSQEGASPAEPSVYATLAIHSHG

SEQ ID NO: 207302 - protein, 528 aa, Artificial Sequence
  Description of Artificial Sequence: Synthetic Chimeric Antigen Receptor
MALPVTALLLPLALLLHAARPGSGSGAQAAEVQLQQSGPELVKPGTSVRISCKTSGYTFTEYTIHWVKQSHGKSLEWIGNINPNNGGTTYNQKFEDKATLTVDKSSSTAYMELRSLTSEDSAVYYCAAGWNFDYWGQGTTVTVSSGGGGSGGGGSGGGGSDIVMTQSHKFMSTSVGDRVSIICKASQDVGTAVDWYQQKPGQSPKLLIYWASTRHTGVPDRFTGSGSGTDFTLTITNVQSEDLADYFCQQYNSYPLTFGAGTMLDLKRAAARSDPASGAGSGSGSAVHKESGNGHNIWVILVVTLVVPLLLVAVLIVCCCIGSGCGGDPKCMDRVCFWRLGLLRGPGAEDNAHNEILSNADSLSTFVSEQQMESQEPADLTGVTVQSPGEAQCLLGPAEAEGSQRRRLLVPANGADPTETLMLFFDKFANIVPFDSWDQLMRQLDLTKNEIDVVRAGTAGPGDALYAMLMKWVNKTGRNASIHTLLDALERMEERHAKEKIQDLLVDSGKFIYLEDGTGSAVSLESHG

SEQ ID NO: 207303 - protein, 535 aa, Artificial Sequence
  Description of Artificial Sequence: Synthetic Chimeric Antigen Receptor
MALPVTALLLPLALLLHAARPGSGSGAQAAEVQLQQSGPELVKPGTSVRISCKTSGYTFTEYTIHWVKQSHGKSLEWIGNINPNNGGTTYNQKFEDKATLTVDKSSSTAYMELRSLTSEDSAVYYCAAGWNFDYWGQGTTVTVSSGGGGSGGGGSGGGGSDIVMTQSHKFMSTSVGDRVSIICKASQDVGTAVDWYQQKPGQSPKLLIYWASTRHTGVPDRFTGSGSGTDFTLTITNVQSEDLADYFCQQYNSYPLTFGAGTMLDLKRAAARSDPASGAGSGSGSAVHYPPQLLGPSCSWEAEGLHCSCSSQASPAPSLRWWLGEELLEGNSSQGSFEVTPSSAGPWANSSLSLHGGLSSGLRLRCKAWNVHGAQSGSVFQLLPGKLEHGGGLGLGAALGAGVAALLAFCSCLVVFRVKICRKEARKRAAAEQDVPSTLGPISQGHQHECSAGSSQDHPPPGAATYTPGKGEEQELHYASLSFQGLRLWEPADQEAPSTTEYSEIKIHTGQPLRGPGFGLQLEREMSGMVPKSHG

SEQ ID NO: 207304 - protein, 545 aa, Artificial Sequence
  Description of Artificial Sequence: Synthetic Chimeric Antigen Receptor
MALPVTALLLPLALLLHAARPGSGSGAQAAEVQLQQSGPELVKPGTSVRISCKTSGYTFTEYTIHWVKQSHGKSLEWIGNINPNNGGTTYNQKFEDKATLTVDKSSSTAYMELRSLTSEDSAVYYCAAGWNFDYWGQGTTVTVSSGGGGSGGGGSGGGGSDIVMTQSHKFMSTSVGDRVSIICKASQDVGTAVDWYQQKPGQSPKLLIYWASTRHTGVPDRFTGSGSGTDFTLTITNVQSEDLADYFCQQYNSYPLTFGAGTMLDLKRAAARSDPASGAGSGSGSAVHYSPKLLGPSCSWEAEGLHCSCSSQASPAPSLRWWLGEELLEGNSSQDSFEVTPSSAGPWANSSLSLHGGLSSGLRLRCEAWNVHGAQSGSILQLPDKKGLISTAFSNGAFLGIGITALLFLCLALIIMKILPKRRTQTETPRPRFSRHSTILDYINVVPTAGPLAQKRNQKATPNSPRTPLPPGAPSPESKKNQKKQYQLPSFPEPKSSTQAPESQESQEELHYATLNFPGVRPRPEARMPKGTQADYAEVKFQSHG

SEQ ID NO: 207305 - protein, 551 aa, Artificial Sequence
  Description of Artificial Sequence: Synthetic Chimeric Antigen Receptor
MALPVTALLLPLALLLHAARPGSGSGAQAAEVQLQQSGPELVKPGTSVRISCKTSGYTFTEYTIHWVKQSHGKSLEWIGNINPNNGGTTYNQKFEDKATLTVDKSSSTAYMELRSLTSEDSAVYYCAAGWNFDYWGQGTTVTVSSGGGGSGGGGSGGGGSDIVMTQSHKFMSTSVGDRVSIICKASQDVGTAVDWYQQKPGQSPKLLIYWASTRHTGVPDRFTGSGSGTDFTLTITNVQSEDLADYFCQQYNSYPLTFGAGTMLDLKRAAARSDPASGAGSGSGSAVHKESGTKHSGEAPAVEETVTSSPGTPASPCSLSGIIIGVTVAAVVLIVAVFVCKSLLWKKVLPYLKGICSGGGGDPERVDRSSQRPGAEDNVLNEIVSILQPTQVPEQEMEVQEPAEPTGVNMLSPGESEHLLEPAEAERSQRRRLLVPANEGDPTETLRQCFDDFADLVPFDSWEPLMRKLGLMDNEIKVAKAEAAGHRDTLYTMLIKWVNKTGRDASVHTLLDALETLGERLAKQKIEDHLLSSGKFMYLEGNADSAMSSHG

SEQ ID NO: 207306 - protein, 670 aa, Artificial Sequence
  Description of Artificial Sequence: Synthetic Chimeric Antigen Receptor
MALPVTALLLPLALLLHAEVQLQQSGPELVKPGTSVRISCKTSGYTFTEYTIHWVKQSHGKSLEWIGNINPNNGGTTYNQKFEDKATLTVDKSSSTAYMELRSLTSEDSAVYYCAAGWNFDYWGQGTTVTVSSGGGGSGGGGSGGGGSDIVMTQSHKFMSTSVGDRVSIICKASQDVGTAVDWYQQKPGQSPKLLIYWASTRHTGVPDRFTGSGSGTDFTLTITNVQSEDLADYFCQQYNSYPLTFGAGTMLDLKRAAATERRAEVPTAHPSPSPRPAGQFQTLVVGVVGGLLGSLVLLVWVLAVICSRAARGTIGARRTGQPLKEDPSAVPVFSVDYGELDFQWREKTPEPPVPCVPEQTEYATIVFPSGMGTSSPARRGSADGPRSAQPLRPEDGHCSWPLSHGGSGEGRGSLLTCGDVEENPGPHMVSKGEELFTGVVPILVELDGDVNGHKFSVSGEGEGDATYGKLTLKFICTTGKLPVPWPTLVTTLTYGVQCFSRYPDHMKQHDFFKSAMPEGYVQERTIFFKDDGNYKTRAEVKFEGDTLVNRIELKGIDFKEDGNILGHKLEYNYNSHNVYIMADKQKNGIKVNFKIRHNIEDGSVQLADHYQQNTPIGDGPVLLPDNHYLSTQSALSKDPNEKRDHMVLLEFVTAAGITLGMDELYKAAD

SEQ ID NO: 207307 - protein, 759 aa, Artificial Sequence
  Description of Artificial Sequence: Synthetic Chimeric Antigen Receptor
MALPVTALLLPLALLLHAARPGSGSGAQAAEVQLQQSGPELVKPGTSVRISCKTSGYTFTEYTIHWVKQSHGKSLEWIGNINPNNGGTTYNQKFEDKATLTVDKSSSTAYMELRSLTSEDSAVYYCAAGWNFDYWGQGTTVTVSSGGGGSGGGGSGGGGSDIVMTQSHKFMSTSVGDRVSIICKASQDVGTAVDWYQQKPGQSPKLLIYWASTRHTGVPDRFTGSGSGTDFTLTITNVQSEDLADYFCQQYNSYPLTFGAGTMLDLKRAAARSDPASGAGSGSGSAKNESAASSTGKTPAAEETVTTILGMLASPYHYLIIIVVLVIILAVVVVGFSCRKKFISYLKGICSGGGGGPERVHRVLFRRRSCPSRVPGAEDNARNETLSNRYLQPTQVSEQEIQGQELAELTGVTVELPEEPQRLLEQAEAEGCQRRRLLVPVNDADSADISTLLDASATLEEGHAKETIQDQLVGSEKLFYEEDEAGSATSCLSHGGSGEGRGSLLTCGDVEENPGPHMVSKGEELFTGVVPILVELDGDVNGHKFSVSGEGEGDATYGKLTLKFICTTGKLPVPWPTLVTTLTYGVQCFSRYPDHMKQHDFFKSAMPEGYVQERTIFFKDDGNYKTRAEVKFEGDTLVNRIELKGIDFKEDGNILGHKLEYNYNSHNVYIMADKQKNGIKVNFKIRHNIEDGSVQLADHYQQNTPIGDGPVLLPDNHYLSTQSALSKDPNEKRDHMVLLEFVTAAGITLGMDELYKAAD

SEQ ID NO: 207308 - protein, 792 aa, Artificial Sequence
  Description of Artificial Sequence: Synthetic Chimeric Antigen Receptor
MALPVTALLLPLALLLHAARPGSGSGAQAAEVQLQQSGPELVKPGTSVRISCKTSGYTFTEYTIHWVKQSHGKSLEWIGNINPNNGGTTYNQKFEDKATLTVDKSSSTAYMELRSLTSEDSAVYYCAAGWNFDYWGQGTTVTVSSGGGGSGGGGSGGGGSDIVMTQSHKFMSTSVGDRVSIICKASQDVGTAVDWYQQKPGQSPKLLIYWASTRHTGVPDRFTGSGSGTDFTLTITNVQSEDLADYFCQQYNSYPLTFGAGTMLDLKRAAARSDPASGAGSGSGSAVHKESGNGHNIWVILVVTLVVPLLLVAVLIVCCCIGSGCGGDPKCMDRVCFWRLGLLRGPGAEDNAHNEILSNADSLSTFVSEQQMESQEPADLTGVTVQSPGEAQCLLGPAEAEGSQRRRLLVPANGADPTETLMLFFDKFANIVPFDSWDQLMRQLDLTKNEIDVVRAGTAGPGDALYAMLMKWVNKTGRNASIHTLLDALERMEERHAKEKIQDLLVDSGKFIYLEDGTGSAVSLESHGGSGEGRGSLLTCGDVEENPGPHMVSKGEELFTGVVPILVELDGDVNGHKFSVSGEGEGDATYGKLTLKFICTTGKLPVPWPTLVTTLTYGVQCFSRYPDHMKQHDFFKSAMPEGYVQERTIFFKDDGNYKTRAEVKFEGDTLVNRIELKGIDFKEDGNILGHKLEYNYNSHNVYIMADKQKNGIKVNFKIRHNIEDGSVQLADHYQQNTPIGDGPVLLPDNHYLSTQSALSKDPNEKRDHMVLLEFVTAAGITLGMDELYKAAD

SEQ ID NO: 207309 - protein, 815 aa, Artificial Sequence
  Description of Artificial Sequence: Synthetic Chimeric Antigen Receptor
MALPVTALLLPLALLLHAARPGSGSGAQAAEVQLQQSGPELVKPGTSVRISCKTSGYTFTEYTIHWVKQSHGKSLEWIGNINPNNGGTTYNQKFEDKATLTVDKSSSTAYMELRSLTSEDSAVYYCAAGWNFDYWGQGTTVTVSSGGGGSGGGGSGGGGSDIVMTQSHKFMSTSVGDRVSIICKASQDVGTAVDWYQQKPGQSPKLLIYWASTRHTGVPDRFTGSGSGTDFTLTITNVQSEDLADYFCQQYNSYPLTFGAGTMLDLKRAAARSDPASGAGSGSGSAVHKESGTKHSGEAPAVEETVTSSPGTPASPCSLSGIIIGVTVAAVVLIVAVFVCKSLLWKKVLPYLKGICSGGGGDPERVDRSSQRPGAEDNVLNEIVSILQPTQVPEQEMEVQEPAEPTGVNMLSPGESEHLLEPAEAERSQRRRLLVPANEGDPTETLRQCFDDFADLVPFDSWEPLMRKLGLMDNEIKVAKAEAAGHRDTLYTMLIKWVNKTGRDASVHTLLDALETLGERLAKQKIEDHLLSSGKFMYLEGNADSAMSSHGGSGEGRGSLLTCGDVEENPGPHMVSKGEELFTGVVPILVELDGDVNGHKFSVSGEGEGDATYGKLTLKFICTTGKLPVPWPTLVTTLTYGVQCFSRYPDHMKQHDFFKSAMPEGYVQERTIFFKDDGNYKTRAEVKFEGDTLVNRIELKGIDFKEDGNILGHKLEYNYNSHNVYIMADKQKNGIKVNFKIRHNIEDGSVQLADHYQQNTPIGDGPVLLPDNHYLSTQSALSKDPNEKRDHMVLLEFVTAAGITLGMDELYKAAD

SEQ ID NO: 207310 - protein, 346 aa, Artificial Sequence
  Description of Artificial Sequence: Synthetic Chimeric Antigen Receptor
MDKDCEMKRTTLDSPLGKLELSGCEQGLHRIIFLGKGTSAADAVEVPAPAAVLGGPEPLMQATAWLNAYFHQPEAIEEFPVPALHHPVFQQESFTRQVLWKLLKVVKFGEVISYSHLAALAGNPAATAAVKTALSGNPVPILIPCHRVVQGDLDVGGYEGGLAVKEWLLAHEGHRLGKPGLGGGGGSGGGGSKRGRKKLLYIFKQPFMRPVQTTQEEDGCSCRFPEEEEGGCELRVKFSRSADAPAYKQGQNQLYNELNLGRREEYDVLDKRRGRDPEMGGKPRRKNPQEGLYNELQKDKMAEAYSEIGMKGERRRGKGHDGLYQGLSTATKDTYDALHMQALPPR

SEQ ID NO: 207311 - protein, 430 aa, Artificial Sequence
  Description of Artificial Sequence: Synthetic Chimeric Antigen Receptor
EVKLQQSGPELVKPGASVKISCKTSGYTFTEYTMHWVKQSHGKSLEWIGGINPNNGGTSYNQKFKGKATLTVDKSSSTAYMELRSLTSEDSAVYYCALQGFAYWGQGTPLTVSSGGGGSGGGGSGGGGSMEIEITQTPALMSASPGEKVTMTCSASSSVSYMYWYQQKPRSSPKPWIYLTSNLASGVPARFSGSGSGTSYSLTISSMEAEDAATYYCQQWSSNPYTFGGGTRLELKGLAVSTISSFFPPGYQIYIWAPLAGTCGVLLLSLVITLYCKRGRKKLLYIFKQPFMRPVQTTQEEDGCSCRFPEEEEGGCELRVKFSRSADAPAYQQGQNQLYNELNLGRREEYDVLDKRRGRDPEMGGKPRRKNPQEGLYNELQKDKMAEAYSEIGMKGERRRGKGHDGLYQGLSTATKDTYDALHMQALPPR

SEQ ID NO: 207312 - protein, 432 aa, Artificial Sequence
  Description of Artificial Sequence: Synthetic Chimeric Antigen Receptor
QVQLKESGPGLVAPSQTLSITCTVSGFSLTSYGVHWVRQPPGKGLEWLGVIWAGGFTNYNSALKSRLSISKDNSKSQVLLKMTSLQTDDTAMYYCARRGSSYSMDYWGQGTSVTVSSGGGGSGGGGSGGGGSEIVLSQSPAITAASLGQKVTITCSASSNVSYIHWYQQRSGTSPRPWIYEISKLASGVPVRFSGSGSGTSYSLTISSMEAEDAAIYYCQQWNYPLITFGSGTKLEIQGLAVSTISSFFPPGYQIYIWAPLAGTCGVLLLSLVITLYCKRGRKKLLYIFKQPFMRPVQTTQEEDGCSCRFPEEEEGGCELRVKFSRSADAPAYQQGQNQLYNELNLGRREEYDVLDKRRGRDPEMGGKPRRKNPQEGLYNELQKDKMAEAYSEIGMKGERRRGKGHDGLYQGLSTATKDTYDALHMQALPPR

SEQ ID NO: 207313 - protein, 433 aa, Artificial Sequence
  Description of Artificial Sequence: Synthetic Chimeric Antigen Receptor
EVKLQQSGPELVKPGASVKISCKTSGYTFTEYTMHWVKQSHGKSLEWIGGINPNNGGTSYNQKFKGKATLTVDKSSSTAYMELRSLTSEDSAVYYCALQGFAYWGQGTPLTVSSGGGGSGGGGSGGGGSMEIEITQTPALMSASPGEKVTMTCSASSSVSYMYWYQQKPRSSPKPWIYLTSNLASGVPARFSGSGSGTSYSLTISSMEAEDAATYYCQQWSSNPYTFGGGTRLELKGLAVSTISSFFPPGYQIISFFLALTSTALLFLLFFLTLRFSVVKRGRKKLLYIFKQPFMRPVQTTQEEDGCSCRFPEEEEGGCELRVKFSRSADAPAYQQGQNQLYNELNLGRREEYDVLDKRRGRDPEMGGKPRRKNPQEGLYNELQKDKMAEAYSEIGMKGERRRGKGHDGLYQGLSTATKDTYDALHMQALPPR

SEQ ID NO: 207314 - protein, 434 aa, Artificial Sequence
  Description of Artificial Sequence: Synthetic Chimeric Antigen Receptor
EVKLVESGGGLVKPGGSLKLSCAASGFTFSSYAMSWVRQTPEKRLEWVASISTGASAYFPDSVKGRFTISRDNARNILYLQMSSLRSEDTAMYYCARITTSTWYFDVWGAGTTVTVSSGGGGSGGGGSGGGGSDIKMTQSPSSMYASLGERVTITCKASQDINSYLSWFQQKPGKSPKTLIYRANRLVDGVPSRFSGSGSGQDYSLTISSLEYEDMGIYYCLQYDEFPYTFGGGTKLEIKGLAVSTISSFFPPGYQIYIWAPLAGTCGVLLLSLVITLYCKRGRKKLLYIFKQPFMRPVQTTQEEDGCSCRFPEEEEGGCELRVKFSRSADAPAYQQGQNQLYNELNLGRREEYDVLDKRRGRDPEMGGKPRRKNPQEGLYNELQKDKMAEAYSEIGMKGERRRGKGHDGLYQGLSTATKDTYDALHMQALPPR

SEQ ID NO: 207315 - protein, 435 aa, Artificial Sequence
  Description of Artificial Sequence: Synthetic Chimeric Antigen Receptor
EVKLVESGGGLVKPGGSLKLSCAASGFTFSSYAMSWVRQIPEKRLEWVASISRGGTTYYPDSVKGRFTISRDNVRNILYLQMSSLRSEDTAMYYCGRYDYDGYYAMDYWGQGTSVTVSSGGGGSGGGGSGGGGSDIKMTQSPSSMYASLGERVTITCKASPDINSYLSWFQQKPGKSPKTLIYRANRLVDGVPSRFSGGGSGQDYSLTINSLEYEDMGIYYCLQYDEFPYTFGGGTKLEMKGLAVSTISSFFPPGYQIYIWAPLAGTCGVLLLSLVITLYCKRGRKKLLYIFKQPFMRPVQTTQEEDGCSCRFPEEEEGGCELRVKFSRSADAPAYQQGQNQLYNELNLGRREEYDVLDKRRGRDPEMGGKPRRKNPQEGLYNELQKDKMAEAYSEIGMKGERRRGKGHDGLYQGLSTATKDTYDALHMQALPPR

SEQ ID NO: 207316 - protein, 435 aa, Artificial Sequence
  Description of Artificial Sequence: Synthetic Chimeric Antigen Receptor
EVQLQQSGPELEKPGASVKISCKASGFAFTGYNMNWVKQTNGKSLEWIGSIDPYYGGSTYNQKFKDKATLTVDKSSSTAYMQLKSLTSDDSAVYYCARSPGGDYAMDYWGQGTSVTVSSGGGGSGGGGSGGGGSDIKMTQSPSSMYASVGERVTITCKASQGINSYSGWFQQKPGKSPKTLIYRGNRLVDGVPSRFSGSGSGQDYSLTISSLEYEDMGIYYCLQYDEFPYTFGGGTKLEIKGLAVSTISSFFPPGYQIYIWAPLAGTCGVLLLSLVITLYCKRGRKKLLYIFKQPFMRPVQTTQEEDGCSCRFPEEEEGGCELRVKFSRSADAPAYQQGQNQLYNELNLGRREEYDVLDKRRGRDPEMGGKPRRKNPQEGLYNELQKDKMAEAYSEIGMKGERRRGKGHDGLYQGLSTATKDTYDALHMQALPPR

SEQ ID NO: 207317 - protein, 435 aa, Artificial Sequence
  Description of Artificial Sequence: Synthetic Chimeric Antigen Receptor
QVQLKESGPGLVAPSQTLSITCTVSGFSLTSYGVHWVRQPPGKGLEWLGVIWAGGFTNYNSALKSRLSISKDNSKSQVLLKMTSLQTDDTAMYYCARRGSSYSMDYWGQGTSVTVSSGGGGSGGGGSGGGGSEIVLSQSPAITAASLGQKVTITCSASSNVSYIHWYQQRSGTSPRPWIYEISKLASGVPVRFSGSGSGTSYSLTISSMEAEDAAIYYCQQWNYPLITFGSGTKLEIQGLAVSTISSFFPPGYQIISFFLALTSTALLFLLFFLTLRFSVVKRGRKKLLYIFKQPFMRPVQTTQEEDGCSCRFPEEEEGGCELRVKFSRSADAPAYQQGQNQLYNELNLGRREEYDVLDKRRGRDPEMGGKPRRKNPQEGLYNELQKDKMAEAYSEIGMKGERRRGKGHDGLYQGLSTATKDTYDALHMQALPPR

SEQ ID NO: 207318 - protein, 435 aa, Artificial Sequence
  Description of Artificial Sequence: Synthetic Chimeric Antigen Receptor
QVQLQQPGAELVKPGTSVKLSCKASGYNFTNYWINWVKLRPGQGLEWIGEIYPGSGSTNYNEKFKSKATLTADTSSSTAYMQLSSLASEDSALYYCARDGNYYAMDYWGQGTSVTVSSGGGGSGGGGSGGGGSDIQMTQTTSSLSASLGDRVTITCRASQDINNYLNWYQQKPDGTVKLLIYYTSALHSGVPSRFSGSGSGTDYSLTISNLEQEDIATYFCQQGNTLPPYTFGGGTKLEIKGLAVSTISSFFPPGYQIYIWAPLAGTCGVLLLSLVITLYCKRGRKKLLYIFKQPFMRPVQTTQEEDGCSCRFPEEEEGGCELRVKFSRSADAPAYQQGQNQLYNELNLGRREEYDVLDKRRGRDPEMGGKPRRKNPQEGLYNELQKDKMAEAYSEIGMKGERRRGKGHDGLYQGLSTATKDTYDALHMQALPPR

SEQ ID NO: 207319 - protein, 436 aa, Artificial Sequence
  Description of Artificial Sequence: Synthetic Chimeric Antigen Receptor
EVKLQESGAELARPGASVKMSCKASGYTFTSYTMHWVKQRPGQGLEWIGYINPSSGYTEYNQKFKDKTTLTADKSSSTAYMQLSSLTSGDSAVYYCARRVLWLRRGDYWGQGTILTVSAGGGGSGGGGSGGGGSMEVLITQTPSSLSASLGERVSLTCRASQDIGSSLNWLQQEPDGTIKRLIYATSSLDSGVPKRFSGSRSGSDYSLTISSLESEDFVDYYCLQYASSPYTFGGGTKLELKGLAVSTISSFFPPGYQIYIWAPLAGTCGVLLLSLVITLYCKRGRKKLLYIFKQPFMRPVQTTQEEDGCSCRFPEEEEGGCELRVKFSRSADAPAYQQGQNQLYNELNLGRREEYDVLDKRRGRDPEMGGKPRRKNPQEGLYNELQKDKMAEAYSEIGMKGERRRGKGHDGLYQGLSTATKDTYDALHMQALPPR

SEQ ID NO: 207320 - protein, 437 aa, Artificial Sequence
  Description of Artificial Sequence: Synthetic Chimeric Antigen Receptor
EVKLVESGGGLVKPGGSLKLSCAASGFTFSSYAMSWVRQTPEKRLEWVASISTGASAYFPDSVKGRFTISRDNARNILYLQMSSLRSEDTAMYYCARITTSTWYFDVWGAGTTVTVSSGGGGSGGGGSGGGGSDIKMTQSPSSMYASLGERVTITCKASQDINSYLSWFQQKPGKSPKTLIYRANRLVDGVPSRFSGSGSGQDYSLTISSLEYEDMGIYYCLQYDEFPYTFGGGTKLEIKGLAVSTISSFFPPGYQIISFFLALTSTALLFLLFFLTLRFSVVKRGRKKLLYIFKQPFMRPVQTTQEEDGCSCRFPEEEEGGCELRVKFSRSADAPAYQQGQNQLYNELNLGRREEYDVLDKRRGRDPEMGGKPRRKNPQEGLYNELQKDKMAEAYSEIGMKGERRRGKGHDGLYQGLSTATKDTYDALHMQALPPR

SEQ ID NO: 207321 - protein, 437 aa, Artificial Sequence
  Description of Artificial Sequence: Synthetic Chimeric Antigen Receptor
QVQLQQSGAELVRPGASVTLSCKASGYTFSDYEMHWVIQTPVHGLEWIGAIDPETGGTAYNQKFKGKAILTADKSSSTAYMELRSLTSEDSAVYYCTGYYDYDSFTYWGQGTLVTVSAGGGGSGGGGSGGGGSDIVMTQSQKIMSTTVGDRVSITCKASQNVDAAVAWYQQKPGQSPKLLIYSASNRYTGVPDRFTGSGSGTDFTLTISNMQSEDLADYFCQQYDIYPYTFGGGTKLEIKGLAVSTISSFFPPGYQIISFFLALTSTALLFLLFFLTLRFSVVKRGRKKLLYIFKQPFMRPVQTTQEEDGCSCRFPEEEEGGCELRVKFSRSADAPAYQQGQNQLYNELNLGRREEYDVLDKRRGRDPEMGGKPRRKNPQEGLYNELQKDKMAEAYSEIGMKGERRRGKGHDGLYQGLSTATKDTYDALHMQALPPR

SEQ ID NO: 207322 - protein, 438 aa, Artificial Sequence
  Description of Artificial Sequence: Synthetic Chimeric Antigen Receptor
EVKLVESGGGLVKPGGSLKLSCAASGFTFSSYAMSWVRQIPEKRLEWVASISRGGTTYYPDSVKGRFTISRDNVRNILYLQMSSLRSEDTAMYYCGRYDYDGYYAMDYWGQGTSVTVSSGGGGSGGGGSGGGGSDIKMTQSPSSMYASLGERVTITCKASPDINSYLSWFQQKPGKSPKTLIYRANRLVDGVPSRFSGGGSGQDYSLTINSLEYEDMGIYYCLQYDEFPYTFGGGTKLEMKGLAVSTISSFFPPGYQIISFFLALTSTALLFLLFFLTLRFSVVKRGRKKLLYIFKQPFMRPVQTTQEEDGCSCRFPEEEEGGCELRVKFSRSADAPAYQQGQNQLYNELNLGRREEYDVLDKRRGRDPEMGGKPRRKNPQEGLYNELQKDKMAEAYSEIGMKGERRRGKGHDGLYQGLSTATKDTYDALHMQALPPR

SEQ ID NO: 207323 - protein, 438 aa, Artificial Sequence
  Description of Artificial Sequence: Synthetic Chimeric Antigen Receptor
EVQLQQSGPELEKPGASVKISCKASGFAFTGYNMNWVKQTNGKSLEWIGSIDPYYGGSTYNQKFKDKATLTVDKSSSTAYMQLKSLTSDDSAVYYCARSPGGDYAMDYWGQGTSVTVSSGGGGSGGGGSGGGGSDIKMTQSPSSMYASVGERVTITCKASQGINSYSGWFQQKPGKSPKTLIYRGNRLVDGVPSRFSGSGSGQDYSLTISSLEYEDMGIYYCLQYDEFPYTFGGGTKLEIKGLAVSTISSFFPPGYQIISFFLALTSTALLFLLFFLTLRFSVVKRGRKKLLYIFKQPFMRPVQTTQEEDGCSCRFPEEEEGGCELRVKFSRSADAPAYQQGQNQLYNELNLGRREEYDVLDKRRGRDPEMGGKPRRKNPQEGLYNELQKDKMAEAYSEIGMKGERRRGKGHDGLYQGLSTATKDTYDALHMQALPPR

SEQ ID NO: 207324 - protein, 438 aa, Artificial Sequence
  Description of Artificial Sequence: Synthetic Chimeric Antigen Receptor
QVQLQQPGAELVKPGTSVKLSCKASGYNFTNYWINWVKLRPGQGLEWIGEIYPGSGSTNYNEKFKSKATLTADTSSSTAYMQLSSLASEDSALYYCARDGNYYAMDYWGQGTSVTVSSGGGGSGGGGSGGGGSDIQMTQTTSSLSASLGDRVTITCRASQDINNYLNWYQQKPDGTVKLLIYYTSALHSGVPSRFSGSGSGTDYSLTISNLEQEDIATYFCQQGNTLPPYTFGGGTKLEIKGLAVSTISSFFPPGYQIISFFLALTSTALLFLLFFLTLRFSVVKRGRKKLLYIFKQPFMRPVQTTQEEDGCSCRFPEEEEGGCELRVKFSRSADAPAYQQGQNQLYNELNLGRREEYDVLDKRRGRDPEMGGKPRRKNPQEGLYNELQKDKMAEAYSEIGMKGERRRGKGHDGLYQGLSTATKDTYDALHMQALPPR

SEQ ID NO: 207325 - protein, 439 aa, Artificial Sequence
  Description of Artificial Sequence: Synthetic Chimeric Antigen Receptor
EVKLQESGAELARPGASVKMSCKASGYTFTSYTMHWVKQRPGQGLEWIGYINPSSGYTEYNQKFKDKTTLTADKSSSTAYMQLSSLTSGDSAVYYCARRVLWLRRGDYWGQGTILTVSAGGGGSGGGGSGGGGSMEVLITQTPSSLSASLGERVSLTCRASQDIGSSLNWLQQEPDGTIKRLIYATSSLDSGVPKRFSGSRSGSDYSLTISSLESEDFVDYYCLQYASSPYTFGGGTKLELKGLAVSTISSFFPPGYQIISFFLALTSTALLFLLFFLTLRFSVVKRGRKKLLYIFKQPFMRPVQTTQEEDGCSCRFPEEEEGGCELRVKFSRSADAPAYQQGQNQLYNELNLGRREEYDVLDKRRGRDPEMGGKPRRKNPQEGLYNELQKDKMAEAYSEIGMKGERRRGKGHDGLYQGLSTATKDTYDALHMQALPPR

SEQ ID NO: 207326 - protein, 454 aa, Artificial Sequence
  Description of Artificial Sequence: Synthetic Chimeric Antigen Receptor
MALPVTALLLPLALLLHAARPQVQLQESGPGLVKPSETLSLTCTVSGFSLTSYGYVHWVRQPPGKGLEWLGVIWAGGFTNYNPSLKSRLTISKDNSKNQVSLKLSSVTAADTAVYYCARRGSSYSMDYWGQGTLVTVSSGGGGSGGGGSGGGGSEIVLTQSPATLSLSPGERATLSCRASSNVSYIHWYQQKPGQAPRPWIYEISKLATGIPARFSGSGSGTDYTLTISSLEPEDFAVYYCQQWNYPLITFGQGTKLEIKGLAVSTISSFFPPGYQIYIWAPLAGTCGVLLLSLVITLYCKRGRKKLLYIFKQPFMRPVQTTQEEDGCSCRFPEEEEGGCELRVKFSRSADAPAYQQGQNQLYNELNLGRREEYDVLDKRRGRDPEMGGKPRRKNPQEGLYNELQKDKMAEAYSEIGMKGERRRGKGHDGLYQGLSTATKDTYDALHMQALPPR

SEQ ID NO: 207327 - protein, 455 aa, Artificial Sequence
  Description of Artificial Sequence: Synthetic Chimeric Antigen Receptor
MALPVTALLLPLALLLHAARPEVQLVESGGGLVKPGGSLRLSCAASGFTFSSYAMSWVRQAPGKGLEWVASISTGASAYFADSVKGRFTISRDNAKNSLYLQMNSLRAEDTAVYYCARITTSTWYFDVWGQGTTVTVSSGGGGSGGGGSGGGGSDIQMTQSPSSLSASVGDRVTITCRASQDINSYLSWFQQKPGKAPKTLIYRANRLQSGVPSRFSGSGSGQDYTLTISSLQPEDFATYYCLQYDEFPYTFGQGTKLEIKGLAVSTISSFFPPGYQIYIWAPLAGTCGVLLLSLVITLYCKRGRKKLLYIFKQPFMRPVQTTQEEDGCSCRFPEEEEGGCELRVKFSRSADAPAYQQGQNQLYNELNLGRREEYDVLDKRRGRDPEMGGKPRRKNPQEGLYNELQKDKMAEAYSEIGMKGERRRGKGHDGLYQGLSTATKDTYDALHMQALPPR

SEQ ID NO: 207328 - protein, 457 aa, Artificial Sequence
  Description of Artificial Sequence: Synthetic Chimeric Antigen Receptor
MALPVTALLLPLALLLHAARPQVQLQESGPGLVKPSETLSLTCTVSGFSLTSYGYVHWVRQPPGKGLEWLGVIWAGGFTNYNPSLKSRLTISKDNSKNQVSLKLSSVTAADTAVYYCARRGSSYSMDYWGQGTLVTVSSGGGGSGGGGSGGGGSEIVLTQSPATLSLSPGERATLSCRASSNVSYIHWYQQKPGQAPRPWIYEISKLATGIPARFSGSGSGTDYTLTISSLEPEDFAVYYCQQWNYPLITFGQGTKLEIKGLAVSTISSFFPPGYQIISFFLALTSTALLFLLFFLTLRFSVVKRGRKKLLYIFKQPFMRPVQTTQEEDGCSCRFPEEEEGGCELRVKFSRSADAPAYQQGQNQLYNELNLGRREEYDVLDKRRGRDPEMGGKPRRKNPQEGLYNELQKDKMAEAYSEIGMKGERRRGKGHDGLYQGLSTATKDTYDALHMQALPPR

SEQ ID NO: 207329 - protein, 458 aa, Artificial Sequence
  Description of Artificial Sequence: Synthetic Chimeric Antigen Receptor
MALPVTALLLPLALLLHAARPEVQLVESGGGLVKPGGSLRLSCAASGFTFSSYAMSWVRQAPGKGLEWVASISTGASAYFADSVKGRFTISRDNAKNSLYLQMNSLRAEDTAVYYCARITTSTWYFDVWGQGTTVTVSSGGGGSGGGGSGGGGSDIQMTQSPSSLSASVGDRVTITCRASQDINSYLSWFQQKPGKAPKTLIYRANRLQSGVPSRFSGSGSGQDYTLTISSLQPEDFATYYCLQYDEFPYTFGQGTKLEIKGLAVSTISSFFPPGYQIISFFLALTSTALLFLLFFLTLRFSVVKRGRKKLLYIFKQPFMRPVQTTQEEDGCSCRFPEEEEGGCELRVKFSRSADAPAYQQGQNQLYNELNLGRREEYDVLDKRRGRDPEMGGKPRRKNPQEGLYNELQKDKMAEAYSEIGMKGERRRGKGHDGLYQGLSTATKDTYDALHMQALPPR

SEQ ID NO: 207330 - protein, 459 aa, Artificial Sequence
  Description of Artificial Sequence: Synthetic Chimeric Antigen Receptor
EVKLQQSGPELVKPGASVKISCKTSGYTFTEYTMHWVKQSHGKSLEWIGGINPNNGGTSYNQKFKGKATLTVDKSSSTAYMELRSLTSEDSAVYYCALQGFAYWGQGTPLTVSSGGGGSGGGGSGGGGSMEIEITQTPALMSASPGEKVTMTCSASSSVSYMYWYQQKPRSSPKPWIYLTSNLASGVPARFSGSGSGTSYSLTISSMEAEDAATYYCQQWSSNPYTFGGGTRLELKTTTPAPRPPTPAPTIASQPLSLRPEACRPAAGGAVHTRGLDFACDIYIWAPLAGTCGVLLLSLVITLYCKRGRKKLLYIFKQPFMRPVQTTQEEDGCSCRFPEEEEGGCELRVKFSRSADAPAYQQGQNQLYNELNLGRREEYDVLDKRRGRDPEMGGKPRRKNPQEGLYNELQKDKMAEAYSEIGMKGERRRGKGHDGLYQGLSTATKDTYDALHMQALPPR

SEQ ID NO: 207331 - protein, 461 aa, Artificial Sequence
  Description of Artificial Sequence: Synthetic Chimeric Antigen Receptor
QVQLKESGPGLVAPSQTLSITCTVSGFSLTSYGVHWVRQPPGKGLEWLGVIWAGGFTNYNSALKSRLSISKDNSKSQVLLKMTSLQTDDTAMYYCARRGSSYSMDYWGQGTSVTVSSGGGGSGGGGSGGGGSEIVLSQSPAITAASLGQKVTITCSASSNVSYIHWYQQRSGTSPRPWIYEISKLASGVPVRFSGSGSGTSYSLTISSMEAEDAAIYYCQQWNYPLITFGSGTKLEIQTTTPAPRPPTPAPTIASQPLSLRPEACRPAAGGAVHTRGLDFACDIYIWAPLAGTCGVLLLSLVITLYCKRGRKKLLYIFKQPFMRPVQTTQEEDGCSCRFPEEEEGGCELRVKFSRSADAPAYQQGQNQLYNELNLGRREEYDVLDKRRGRDPEMGGKPRRKNPQEGLYNELQKDKMAEAYSEIGMKGERRRGKGHDGLYQGLSTATKDTYDALHMQALPPR

SEQ ID NO: 207332 - protein, 462 aa, Artificial Sequence
  Description of Artificial Sequence: Synthetic Chimeric Antigen Receptor
EVKLQQSGPELVKPGASVKISCKTSGYTFTEYTMHWVKQSHGKSLEWIGGINPNNGGTSYNQKFKGKATLTVDKSSSTAYMELRSLTSEDSAVYYCALQGFAYWGQGTPLTVSSGGGGSGGGGSGGGGSMEIEITQTPALMSASPGEKVTMTCSASSSVSYMYWYQQKPRSSPKPWIYLTSNLASGVPARFSGSGSGTSYSLTISSMEAEDAATYYCQQWSSNPYTFGGGTRLELKTTTPAPRPPTPAPTIASQPLSLRPEACRPAAGGAVHTRGLDFACDIISFFLALTSTALLFLLFFLTLRFSVVKRGRKKLLYIFKQPFMRPVQTTQEEDGCSCRFPEEEEGGCELRVKFSRSADAPAYQQGQNQLYNELNLGRREEYDVLDKRRGRDPEMGGKPRRKNPQEGLYNELQKDKMAEAYSEIGMKGERRRGKGHDGLYQGLSTATKDTYDALHMQALPPR

SEQ ID NO: 207333 - protein, 463 aa, Artificial Sequence
  Description of Artificial Sequence: Synthetic Chimeric Antigen Receptor
EVKLVESGGGLVKPGGSLKLSCAASGFTFSSYAMSWVRQTPEKRLEWVASISTGASAYFPDSVKGRFTISRDNARNILYLQMSSLRSEDTAMYYCARITTSTWYFDVWGAGTTVTVSSGGGGSGGGGSGGGGSDIKMTQSPSSMYASLGERVTITCKASQDINSYLSWFQQKPGKSPKTLIYRANRLVDGVPSRFSGSGSGQDYSLTISSLEYEDMGIYYCLQYDEFPYTFGGGTKLEIKTTTPAPRPPTPAPTIASQPLSLRPEACRPAAGGAVHTRGLDFACDIYIWAPLAGTCGVLLLSLVITLYCKRGRKKLLYIFKQPFMRPVQTTQEEDGCSCRFPEEEEGGCELRVKFSRSADAPAYQQGQNQLYNELNLGRREEYDVLDKRRGRDPEMGGKPRRKNPQEGLYNELQKDKMAEAYSEIGMKGERRRGKGHDGLYQGLSTATKDTYDALHMQALPPR

SEQ ID NO: 207334 - protein, 463 aa, Artificial Sequence
  Description of Artificial Sequence: Synthetic Chimeric Antigen Receptor
QVQLQQSGAELVRPGASVTLSCKASGYTFSDYEMHWVIQTPVHGLEWIGAIDPETGGTAYNQKFKGKAILTADKSSSTAYMELRSLTSEDSAVYYCTGYYDYDSFTYWGQGTLVTVSAGGGGSGGGGSGGGGSDIVMTQSQKIMSTTVGDRVSITCKASQNVDAAVAWYQQKPGQSPKLLIYSASNRYTGVPDRFTGSGSGTDFTLTISNMQSEDLADYFCQQYDIYPYTFGGGTKLEIKTTTPAPRPPTPAPTIASQPLSLRPEACRPAAGGAVHTRGLDFACDIYIWAPLAGTCGVLLLSLVITLYCKRGRKKLLYIFKQPFMRPVQTTQEEDGCSCRFPEEEEGGCELRVKFSRSADAPAYQQGQNQLYNELNLGRREEYDVLDKRRGRDPEMGGKPRRKNPQEGLYNELQKDKMAEAYSEIGMKGERRRGKGHDGLYQGLSTATKDTYDALHMQALPPR

SEQ ID NO: 207335 - protein, 464 aa, Artificial Sequence
  Description of Artificial Sequence: Synthetic Chimeric Antigen Receptor
EVKLVESGGGLVKPGGSLKLSCAASGFTFSSYAMSWVRQIPEKRLEWVASISRGGTTYYPDSVKGRFTISRDNVRNILYLQMSSLRSEDTAMYYCGRYDYDGYYAMDYWGQGTSVTVSSGGGGSGGGGSGGGGSDIKMTQSPSSMYASLGERVTITCKASPDINSYLSWFQQKPGKSPKTLIYRANRLVDGVPSRFSGGGSGQDYSLTINSLEYEDMGIYYCLQYDEFPYTFGGGTKLEMKTTTPAPRPPTPAPTIASQPLSLRPEACRPAAGGAVHTRGLDFACDIYIWAPLAGTCGVLLLSLVITLYCKRGRKKLLYIFKQPFMRPVQTTQEEDGCSCRFPEEEEGGCELRVKFSRSADAPAYQQGQNQLYNELNLGRREEYDVLDKRRGRDPEMGGKPRRKNPQEGLYNELQKDKMAEAYSEIGMKGERRRGKGHDGLYQGLSTATKDTYDALHMQALPPR

SEQ ID NO: 207336 - protein, 464 aa, Artificial Sequence
  Description of Artificial Sequence: Synthetic Chimeric Antigen Receptor
EVQLQQSGPELEKPGASVKISCKASGFAFTGYNMNWVKQTNGKSLEWIGSIDPYYGGSTYNQKFKDKATLTVDKSSSTAYMQLKSLTSDDSAVYYCARSPGGDYAMDYWGQGTSVTVSSGGGGSGGGGSGGGGSDIKMTQSPSSMYASVGERVTITCKASQGINSYSGWFQQKPGKSPKTLIYRGNRLVDGVPSRFSGSGSGQDYSLTISSLEYEDMGIYYCLQYDEFPYTFGGGTKLEIKTTTPAPRPPTPAPTIASQPLSLRPEACRPAAGGAVHTRGLDFACDIYIWAPLAGTCGVLLLSLVITLYCKRGRKKLLYIFKQPFMRPVQTTQEEDGCSCRFPEEEEGGCELRVKFSRSADAPAYQQGQNQLYNELNLGRREEYDVLDKRRGRDPEMGGKPRRKNPQEGLYNELQKDKMAEAYSEIGMKGERRRGKGHDGLYQGLSTATKDTYDALHMQALPPR

SEQ ID NO: 207337 - protein, 464 aa, Artificial Sequence
  Description of Artificial Sequence: Synthetic Chimeric Antigen Receptor
QVQLKESGPGLVAPSQTLSITCTVSGFSLTSYGVHWVRQPPGKGLEWLGVIWAGGFTNYNSALKSRLSISKDNSKSQVLLKMTSLQTDDTAMYYCARRGSSYSMDYWGQGTSVTVSSGGGGSGGGGSGGGGSEIVLSQSPAITAASLGQKVTITCSASSNVSYIHWYQQRSGTSPRPWIYEISKLASGVPVRFSGSGSGTSYSLTISSMEAEDAAIYYCQQWNYPLITFGSGTKLEIQTTTPAPRPPTPAPTIASQPLSLRPEACRPAAGGAVHTRGLDFACDIISFFLALTSTALLFLLFFLTLRFSVVKRGRKKLLYIFKQPFMRPVQTTQEEDGCSCRFPEEEEGGCELRVKFSRSADAPAYQQGQNQLYNELNLGRREEYDVLDKRRGRDPEMGGKPRRKNPQEGLYNELQKDKMAEAYSEIGMKGERRRGKGHDGLYQGLSTATKDTYDALHMQALPPR

SEQ ID NO: 207338 - protein, 464 aa, Artificial Sequence
  Description of Artificial Sequence: Synthetic Chimeric Antigen Receptor
QVQLQQPGAELVKPGTSVKLSCKASGYNFTNYWINWVKLRPGQGLEWIGEIYPGSGSTNYNEKFKSKATLTADTSSSTAYMQLSSLASEDSALYYCARDGNYYAMDYWGQGTSVTVSSGGGGSGGGGSGGGGSDIQMTQTTSSLSASLGDRVTITCRASQDINNYLNWYQQKPDGTVKLLIYYTSALHSGVPSRFSGSGSGTDYSLTISNLEQEDIATYFCQQGNTLPPYTFGGGTKLEIKTTTPAPRPPTPAPTIASQPLSLRPEACRPAAGGAVHTRGLDFACDIYIWAPLAGTCGVLLLSLVITLYCKRGRKKLLYIFKQPFMRPVQTTQEEDGCSCRFPEEEEGGCELRVKFSRSADAPAYQQGQNQLYNELNLGRREEYDVLDKRRGRDPEMGGKPRRKNPQEGLYNELQKDKMAEAYSEIGMKGERRRGKGHDGLYQGLSTATKDTYDALHMQALPPR

SEQ ID NO: 207339 - protein, 466 aa, Artificial Sequence
  Description of Artificial Sequence: Synthetic Chimeric Antigen Receptor
EVKLVESGGGLVKPGGSLKLSCAASGFTFSSYAMSWVRQTPEKRLEWVASISTGASAYFPDSVKGRFTISRDNARNILYLQMSSLRSEDTAMYYCARITTSTWYFDVWGAGTTVTVSSGGGGSGGGGSGGGGSDIKMTQSPSSMYASLGERVTITCKASQDINSYLSWFQQKPGKSPKTLIYRANRLVDGVPSRFSGSGSGQDYSLTISSLEYEDMGIYYCLQYDEFPYTFGGGTKLEIKTTTPAPRPPTPAPTIASQPLSLRPEACRPAAGGAVHTRGLDFACDIISFFLALTSTALLFLLFFLTLRFSVVKRGRKKLLYIFKQPFMRPVQTTQEEDGCSCRFPEEEEGGCELRVKFSRSADAPAYQQGQNQLYNELNLGRREEYDVLDKRRGRDPEMGGKPRRKNPQEGLYNELQKDKMAEAYSEIGMKGERRRGKGHDGLYQGLSTATKDTYDALHMQALPPR

SEQ ID NO: 207340 - protein, 466 aa, Artificial Sequence
  Description of Artificial Sequence: Synthetic Chimeric Antigen Receptor
QVQLQQSGAELVRPGASVTLSCKASGYTFSDYEMHWVIQTPVHGLEWIGAIDPETGGTAYNQKFKGKAILTADKSSSTAYMELRSLTSEDSAVYYCTGYYDYDSFTYWGQGTLVTVSAGGGGSGGGGSGGGGSDIVMTQSQKIMSTTVGDRVSITCKASQNVDAAVAWYQQKPGQSPKLLIYSASNRYTGVPDRFTGSGSGTDFTLTISNMQSEDLADYFCQQYDIYPYTFGGGTKLEIKTTTPAPRPPTPAPTIASQPLSLRPEACRPAAGGAVHTRGLDFACDIISFFLALTSTALLFLLFFLTLRFSVVKRGRKKLLYIFKQPFMRPVQTTQEEDGCSCRFPEEEEGGCELRVKFSRSADAPAYQQGQNQLYNELNLGRREEYDVLDKRRGRDPEMGGKPRRKNPQEGLYNELQKDKMAEAYSEIGMKGERRRGKGHDGLYQGLSTATKDTYDALHMQALPPR

SEQ ID NO: 207341 - protein, 467 aa, Artificial Sequence
  Description of Artificial Sequence: Synthetic Chimeric Antigen Receptor
EVKLVESGGGLVKPGGSLKLSCAASGFTFSSYAMSWVRQIPEKRLEWVASISRGGTTYYPDSVKGRFTISRDNVRNILYLQMSSLRSEDTAMYYCGRYDYDGYYAMDYWGQGTSVTVSSGGGGSGGGGSGGGGSDIKMTQSPSSMYASLGERVTITCKASPDINSYLSWFQQKPGKSPKTLIYRANRLVDGVPSRFSGGGSGQDYSLTINSLEYEDMGIYYCLQYDEFPYTFGGGTKLEMKTTTPAPRPPTPAPTIASQPLSLRPEACRPAAGGAVHTRGLDFACDIISFFLALTSTALLFLLFFLTLRFSVVKRGRKKLLYIFKQPFMRPVQTTQEEDGCSCRFPEEEEGGCELRVKFSRSADAPAYQQGQNQLYNELNLGRREEYDVLDKRRGRDPEMGGKPRRKNPQEGLYNELQKDKMAEAYSEIGMKGERRRGKGHDGLYQGLSTATKDTYDALHMQALPPR

SEQ ID NO: 207342 - protein, 467 aa, Artificial Sequence
  Description of Artificial Sequence: Synthetic Chimeric Antigen Receptor
EVQLQQSGPELEKPGASVKISCKASGFAFTGYNMNWVKQTNGKSLEWIGSIDPYYGGSTYNQKFKDKATLTVDKSSSTAYMQLKSLTSDDSAVYYCARSPGGDYAMDYWGQGTSVTVSSGGGGSGGGGSGGGGSDIKMTQSPSSMYASVGERVTITCKASQGINSYSGWFQQKPGKSPKTLIYRGNRLVDGVPSRFSGSGSGQDYSLTISSLEYEDMGIYYCLQYDEFPYTFGGGTKLEIKTTTPAPRPPTPAPTIASQPLSLRPEACRPAAGGAVHTRGLDFACDIISFFLALTSTALLFLLFFLTLRFSVVKRGRKKLLYIFKQPFMRPVQTTQEEDGCSCRFPEEEEGGCELRVKFSRSADAPAYQQGQNQLYNELNLGRREEYDVLDKRRGRDPEMGGKPRRKNPQEGLYNELQKDKMAEAYSEIGMKGERRRGKGHDGLYQGLSTATKDTYDALHMQALPPR

SEQ ID NO: 207343 - protein, 467 aa, Artificial Sequence
  Description of Artificial Sequence: Synthetic Chimeric Antigen Receptor
QVQLQQPGAELVKPGTSVKLSCKASGYNFTNYWINWVKLRPGQGLEWIGEIYPGSGSTNYNEKFKSKATLTADTSSSTAYMQLSSLASEDSALYYCARDGNYYAMDYWGQGTSVTVSSGGGGSGGGGSGGGGSDIQMTQTTSSLSASLGDRVTITCRASQDINNYLNWYQQKPDGTVKLLIYYTSALHSGVPSRFSGSGSGTDYSLTISNLEQEDIATYFCQQGNTLPPYTFGGGTKLEIKTTTPAPRPPTPAPTIASQPLSLRPEACRPAAGGAVHTRGLDFACDIISFFLALTSTALLFLLFFLTLRFSVVKRGRKKLLYIFKQPFMRPVQTTQEEDGCSCRFPEEEEGGCELRVKFSRSADAPAYQQGQNQLYNELNLGRREEYDVLDKRRGRDPEMGGKPRRKNPQEGLYNELQKDKMAEAYSEIGMKGERRRGKGHDGLYQGLSTATKDTYDALHMQALPPR

SEQ ID NO: 207344 - protein, 468 aa, Artificial Sequence
  Description of Artificial Sequence: Synthetic Chimeric Antigen Receptor
EVKLQESGAELARPGASVKMSCKASGYTFTSYTMHWVKQRPGQGLEWIGYINPSSGYTEYNQKFKDKTTLTADKSSSTAYMQLSSLTSGDSAVYYCARRVLWLRRGDYWGQGTILTVSAGGGGSGGGGSGGGGSMEVLITQTPSSLSASLGERVSLTCRASQDIGSSLNWLQQEPDGTIKRLIYATSSLDSGVPKRFSGSRSGSDYSLTISSLESEDFVDYYCLQYASSPYTFGGGTKLELKTTTPAPRPPTPAPTIASQPLSLRPEACRPAAGGAVHTRGLDFACDIISFFLALTSTALLFLLFFLTLRFSVVKRGRKKLLYIFKQPFMRPVQTTQEEDGCSCRFPEEEEGGCELRVKFSRSADAPAYQQGQNQLYNELNLGRREEYDVLDKRRGRDPEMGGKPRRKNPQEGLYNELQKDKMAEAYSEIGMKGERRRGKGHDGLYQGLSTATKDTYDALHMQALPPR

SEQ ID NO: 207345 - protein, 483 aa, Artificial Sequence
  Description of Artificial Sequence: Synthetic Chimeric Antigen Receptor
MALPVTALLLPLALLLHAARPEIVLTQSPGTLSLSPGERATLSCRASQSVSSSYLAWYQQKPGQAPRLLIYGASSRATGIPDRFSGSGSGTDFTLTISRLEPEDFAVYYCQQYGSSFGPGTKVDIKRGGGGSGGGGSGGGGSQVQLVQSGTEVKKPGSSVKVSCQASGGSLSSHGVSWLRQAPGQGLEWVGRIIPMFGVTDYAQKFQDRVTITADKSTSTVYMELISLGSDDTAVYFCARESRGATFEYWGQGTLVTVSSTTTPAPRPPTPAPTIASQPLSLRPEACRPAAGGAVHTRGLDFACDIYIWAPLAGTCGVLLLSLVITLYCKRGRKKLLYIFKQPFMRPVQTTQEEDGCSCRFPEEEEGGCELRVKFSRSADAPAYQQGQNQLYNELNLGRREEYDVLDKRRGRDPEMGGKPRRKNPQEGLYNELQKDKMAEAYSEIGMKGERRRGKGHDGLYQGLSTATKDTYDALHMQALPPR

SEQ ID NO: 207346 - protein, 483 aa, Artificial Sequence
  Description of Artificial Sequence: Synthetic Chimeric Antigen Receptor
MALPVTALLLPLALLLHAARPQVQLQESGPGLVKPSETLSLTCTVSGFSLTSYGYVHWVRQPPGKGLEWLGVIWAGGFTNYNPSLKSRLTISKDNSKNQVSLKLSSVTAADTAVYYCARRGSSYSMDYWGQGTLVTVSSGGGGSGGGGSGGGGSEIVLTQSPATLSLSPGERATLSCRASSNVSYIHWYQQKPGQAPRPWIYEISKLATGIPARFSGSGSGTDYTLTISSLEPEDFAVYYCQQWNYPLITFGQGTKLEIKTTTPAPRPPTPAPTIASQPLSLRPEACRPAAGGAVHTRGLDFACDIYIWAPLAGTCGVLLLSLVITLYCKRGRKKLLYIFKQPFMRPVQTTQEEDGCSCRFPEEEEGGCELRVKFSRSADAPAYQQGQNQLYNELNLGRREEYDVLDKRRGRDPEMGGKPRRKNPQEGLYNELQKDKMAEAYSEIGMKGERRRGKGHDGLYQGLSTATKDTYDALHMQALPPR

SEQ ID NO: 207347 - protein, 484 aa, Artificial Sequence
  Description of Artificial Sequence: Synthetic Chimeric Antigen Receptor
MALPVTALLLPLALLLHAARPEVQLVESGGGLVKPGGSLRLSCAASGFTFSSYAMSWVRQAPGKGLEWVASISTGASAYFADSVKGRFTISRDNAKNSLYLQMNSLRAEDTAVYYCARITTSTWYFDVWGQGTTVTVSSGGGGSGGGGSGGGGSDIQMTQSPSSLSASVGDRVTITCRASQDINSYLSWFQQKPGKAPKTLIYRANRLQSGVPSRFSGSGSGQDYTLTISSLQPEDFATYYCLQYDEFPYTFGQGTKLEIKTTTPAPRPPTPAPTIASQPLSLRPEACRPAAGGAVHTRGLDFACDIYIWAPLAGTCGVLLLSLVITLYCKRGRKKLLYIFKQPFMRPVQTTQEEDGCSCRFPEEEEGGCELRVKFSRSADAPAYQQGQNQLYNELNLGRREEYDVLDKRRGRDPEMGGKPRRKNPQEGLYNELQKDKMAEAYSEIGMKGERRRGKGHDGLYQGLSTATKDTYDALHMQALPPR

SEQ ID NO: 207348 - protein, 485 aa, Artificial Sequence
  Description of Artificial Sequence: Synthetic Chimeric Antigen Receptor
MALPVTALLLPLALLLHAARPDIQMTQSPSSVSASVGDRVTITCRASQGISTLLAWYQQKPGKAPKLLISSASSLQSGVPARFSGSGSGTDFTLTISSLQPEDFATYYCQQSYRAPTFGQGTKVEIKRGGGGSGGGGSGGGGSQVTLKESGPTLLKPTQTLTLTCTFSGFSLSTRGVGVGWIRQPPGQALEWLTLIYWDDDKRYSPSLKSRLTITKDTSKNQVVLTMTNMESVDTATYYCAQQTMTGAFDIWGQGTTVTVSSTTTPAPRPPTPAPTIASQPLSLRPEACRPAAGGAVHTRGLDFACDIYIWAPLAGTCGVLLLSLVITLYCKRGRKKLLYIFKQPFMRPVQTTQEEDGCSCRFPEEEEGGCELRVKFSRSADAPAYQQGQNQLYNELNLGRREEYDVLDKRRGRDPEMGGKPRRKNPQEGLYNELQKDKMAEAYSEIGMKGERRRGKGHDGLYQGLSTATKDTYDALHMQALPPR

SEQ ID NO: 207349 - protein, 486 aa, Artificial Sequence
  Description of Artificial Sequence: Synthetic Chimeric Antigen Receptor
MALPVTALLLPLALLLHAARPEVKLQESGAELARPGASVKMSCKASGYTFTSYTMHWVKQRPGQGLEWIGYINPSSGYTEYNQKFKDKTTLTADKSSSTAYMQLSSLTSGDSAVYYCARRVLWLRRGDYWGQGTILTVSAGGGGSGGGGSGGGGSMEVLITQTPSSLSASLGERVSLTCRASQDIGSSLNWLQQEPDGTIKRLIYATSSLDSGVPKRFSGSRSGSDYSLTISSLESEDFVDYYCLQYASSPYTFGGGTKLELKTTTPAPRPPTPAPTIASQPLSLRPEACRPAAGGAVHTRGLDFACDIYIWAPLAGTCGVLLLSLVITLYCKRGRKKLLYIFKQPFMRPVQTTQEEDGCSCRFPEEEEGGCELRVKFSRSADAPAYQQGQNQLYNELNLGRREEYDVLDKRRGRDPEMGGKPRRKNPQEGLYNELQKDKMAEAYSEIGMKGERRRGKGHDGLYQGLSTATKDTYDALHMQALPPR

SEQ ID NO: 207350 - protein, 486 aa, Artificial Sequence
  Description of Artificial Sequence: Synthetic Chimeric Antigen Receptor
MALPVTALLLPLALLLHAARPQVQLQESGPGLVKPSETLSLTCTVSGFSLTSYGYVHWVRQPPGKGLEWLGVIWAGGFTNYNPSLKSRLTISKDNSKNQVSLKLSSVTAADTAVYYCARRGSSYSMDYWGQGTLVTVSSGGGGSGGGGSGGGGSEIVLTQSPATLSLSPGERATLSCRASSNVSYIHWYQQKPGQAPRPWIYEISKLATGIPARFSGSGSGTDYTLTISSLEPEDFAVYYCQQWNYPLITFGQGTKLEIKTTTPAPRPPTPAPTIASQPLSLRPEACRPAAGGAVHTRGLDFACDIISFFLALTSTALLFLLFFLTLRFSVVKRGRKKLLYIFKQPFMRPVQTTQEEDGCSCRFPEEEEGGCELRVKFSRSADAPAYQQGQNQLYNELNLGRREEYDVLDKRRGRDPEMGGKPRRKNPQEGLYNELQKDKMAEAYSEIGMKGERRRGKGHDGLYQGLSTATKDTYDALHMQALPPR

SEQ ID NO: 207351 - protein, 487 aa, Artificial Sequence
  Description of Artificial Sequence: Synthetic Chimeric Antigen Receptor
MALPVTALLLPLALLLHAARPEVQLVESGGGLVKPGGSLRLSCAASGFTFSSYAMSWVRQAPGKGLEWVASISTGASAYFADSVKGRFTISRDNAKNSLYLQMNSLRAEDTAVYYCARITTSTWYFDVWGQGTTVTVSSGGGGSGGGGSGGGGSDIQMTQSPSSLSASVGDRVTITCRASQDINSYLSWFQQKPGKAPKTLIYRANRLQSGVPSRFSGSGSGQDYTLTISSLQPEDFATYYCLQYDEFPYTFGQGTKLEIKTTTPAPRPPTPAPTIASQPLSLRPEACRPAAGGAVHTRGLDFACDIISFFLALTSTALLFLLFFLTLRFSVVKRGRKKLLYIFKQPFMRPVQTTQEEDGCSCRFPEEEEGGCELRVKFSRSADAPAYQQGQNQLYNELNLGRREEYDVLDKRRGRDPEMGGKPRRKNPQEGLYNELQKDKMAEAYSEIGMKGERRRGKGHDGLYQGLSTATKDTYDALHMQALPPR

SEQ ID NO: 207352 - protein, 488 aa, Artificial Sequence
  Description of Artificial Sequence: Synthetic Chimeric Antigen Receptor
MALPVTALLLPLALLLHAARPETTLTQSPAFMSATPGDKVNISCKASQDIDDDLNWYQQKPGEAPILIIQEATTLVPGIPPRFSGSGFGTDFTLTINSMQSEDVAYYFCLQHDNFPPTFGQGTKVEIKRGGGGSGGGGSGGGGSQVQLQESGPGLVKSSETLSLTCTVSGGSMNNYYWSWIRQPAGKGLEWMGRIYSSGSTNYNPALKSRVTMSVDTSKNQFSLNLSSVTAADTAIYYCARASWSGTYWALFDYWGQGTLVTVSSTTTPAPRPPTPAPTIASQPLSLRPEACRPAAGGAVHTRGLDFACDIYIWAPLAGTCGVLLLSLVITLYCKRGRKKLLYIFKQPFMRPVQTTQEEDGCSCRFPEEEEGGCELRVKFSRSADAPAYQQGQNQLYNELNLGRREEYDVLDKRRGRDPEMGGKPRRKNPQEGLYNELQKDKMAEAYSEIGMKGERRRGKGHDGLYQGLSTATKDTYDALHMQALPPR

SEQ ID NO: 207353 - protein, 489 aa, Artificial Sequence
  Description of Artificial Sequence: Synthetic Chimeric Antigen Receptor
MALPVTALLLPLALLLHAARPDIQMTQSPSSLSASVGDRVTITCQASQDISNYLNWYQQKPGKAPKLLIYDASNLETGVPSRFSGSGSGTDFTFTISSLQPEDIATYYCQQYDNLPLTFGGGTKLEIKRGGGGSGGGGSGGGGSEVQLVESGGGLVKPGGSLRLSCAASGFTFSDYYMGWVRQAPGKGLKWLSYISDRAHTIYDTDSVKGRFTISRDDAKSSLYLRMNNLRVEDTAVYYCARAVGAGEGFDYWGQGTLVTVSSAAATTTPAPRPPTPAPTIASQPLSLRPEACRPAAGGAVHTRGLDFACDIYIWAPLAGTCGVLLLSLVITLYCKRGRKKLLYIFKQPFMRPVQTTQEEDGCSCRFPEEEEGGCELRVKFSRSADAPAYQQGQNQLYNELNLGRREEYDVLDKRRGRDPEMGGKPRRKNPQEGLYNELQKDKMAEAYSEIGMKGERRRGKGHDGLYQGLSTATKDTYDALHMQALPPR

SEQ ID NO: 207354 - protein, 490 aa, Artificial Sequence
  Description of Artificial Sequence: Synthetic Chimeric Antigen Receptor
MALPVTALLLPLALLLHAARPQSALTQPASVSGSPGQSITISCTGTSSDVGGYNYVSWYQQHPGKAPKLMIYDVSKRPSGVSNRFSGSKSGNTASLTISGLQAEDEADYYCSSYTGRSTVFGGGTKLTVLGGGGGSGGGGSGGGGSEVQLVQSGGDLVQPGGSLRLSCAASGFTFSSYSMNWVRQAPGKGLEWVSSISSSSSYIYYADSVKGRFTISRDNAKNSLYLQMNSLRAEDTAVYYCARGLGGWTHDAFDIWGQGTTVTVSSTTTPAPRPPTPAPTIASQPLSLRPEACRPAAGGAVHTRGLDFACDIYIWAPLAGTCGVLLLSLVITLYCKRGRKKLLYIFKQPFMRPVQTTQEEDGCSCRFPEEEEGGCELRVKFSRSADAPAYQQGQNQLYNELNLGRREEYDVLDKRRGRDPEMGGKPRRKNPQEGLYNELQKDKMAEAYSEIGMKGERRRGKGHDGLYQGLSTATKDTYDALHMQALPPR

SEQ ID NO: 207355 - protein, 491 aa, Artificial Sequence
  Description of Artificial Sequence: Synthetic Chimeric Antigen Receptor
MALPVTALLLPLALLLHAARPQSALTQPPSASGTPGQRVTISCPGSSSNIGSNYVYWYQQLPGTAPKLLIYRNNQRPSGVPDRFSGSKSGTSATLGITGLQTGDEADYYCGTWDSSLSAYVFGTGTKVTVLGGGGGSGGGGSGGGGSQVQLQQSGAEVKKPGASVKVSCKASGYTFSRYYIHWVRRAPGQGLEWMGLINPGGGSTNYAQKFQGRVTMTRDTSTNTVYLELSSLRSDDTAVYYCARDYGTIDARRFDFWGQGTLVTVSSTTTPAPRPPTPAPTIASQPLSLRPEACRPAAGGAVHTRGLDFACDIYIWAPLAGTCGVLLLSLVITLYCKRGRKKLLYIFKQPFMRPVQTTQEEDGCSCRFPEEEEGGCELRVKFSRSADAPAYQQGQNQLYNELNLGRREEYDVLDKRRGRDPEMGGKPRRKNPQEGLYNELQKDKMAEAYSEIGMKGERRRGKGHDGLYQGLSTATKDTYDALHMQALPPR

SEQ ID NO: 207356 - protein, 491 aa, Artificial Sequence
  Description of Artificial Sequence: Synthetic Chimeric Antigen Receptor
MALPVTALLLPLALLLHAARPQSVLTQPPSASGTPGQRVTISCSGSSSNIGSNTVNWYQQLPGTAPKLLIYSNNQRPSGVPDRFSGSKSGTSASLAIRGLQSDDEAEYYCAAWDDSLKSFVFGKGTKVTVLGGGGGSGGGGSGGGGSQVQLVQSGAEVKKPGASVKVSCKASGYTFSRYYIHWVRQAPGQGLEWMGLINPGGGSTNYAQKFQGRVTMTRDTSTNTVYLELSSLRSDDTAVYYCARDYGTIDARRFDFWGQGTLVTVSSTTTPAPRPPTPAPTIASQPLSLRPEACRPAAGGAVHTRGLDFACDIYIWAPLAGTCGVLLLSLVITLYCKRGRKKLLYIFKQPFMRPVQTTQEEDGCSCRFPEEEEGGCELRVKFSRSADAPAYQQGQNQLYNELNLGRREEYDVLDKRRGRDPEMGGKPRRKNPQEGLYNELQKDKMAEAYSEIGMKGERRRGKGHDGLYQGLSTATKDTYDALHMQALPPR

SEQ ID NO: 207357 - protein, 492 aa, Artificial Sequence
  Description of Artificial Sequence: Synthetic Chimeric Antigen Receptor
MALPVTALLLPLALLLHAARPQSALTQPASVSGSPGQSITISCTGTSSDFGDYDYVSWYQQHPGKAPKLMIYDVSDRPSGVSNRFSGSKSGNTASLTISGLQAEDEADYFCSSFTTSSTLVFGGGTKLTVLGGGGGSGGGGSGGGGSQVQLVQSGAEVKKPGASVKVSCKASGYTFTGYYMHWVRQAPGQGLEWMGWINPNSGGTNYAQKFQGRVTMTRDTSISTAYMELSRLRSDDTAVYYCARDGDMVYDSSGPDYWGQGTLVTVSSTTTPAPRPPTPAPTIASQPLSLRPEACRPAAGGAVHTRGLDFACDIYIWAPLAGTCGVLLLSLVITLYCKRGRKKLLYIFKQPFMRPVQTTQEEDGCSCRFPEEEEGGCELRVKFSRSADAPAYQQGQNQLYNELNLGRREEYDVLDKRRGRDPEMGGKPRRKNPQEGLYNELQKDKMAEAYSEIGMKGERRRGKGHDGLYQGLSTATKDTYDALHMQALPPR

SEQ ID NO: 207358 - protein, 494 aa, Artificial Sequence
  Description of Artificial Sequence: Synthetic Chimeric Antigen Receptor
MALPVTALLLPLALLLHAARPQSALTQPPSASGTPGQRVTISCSGSSSNIGSNYVYWYQQLPGTAPKLLIYRNNQRPSGVPDRFSGSKSGTSASLAISGLRSEDEADYYCAAWDDSLSGYVFGTGTKVTVLGGGGGSGGGGSGGGGSQMQLVQSGAEVKKPGASVKVSCKASGYTFSRYYIHWVRQAPGQGLEWMGLINPGGGSTNYAQKFQGRVTMTRDTSTNTVYLELSSLRSDDTAVYYCARDYGTIDARRFDFWGQGTLVTVSSAAATTTPAPRPPTPAPTIASQPLSLRPEACRPAAGGAVHTRGLDFACDIYIWAPLAGTCGVLLLSLVITLYCKRGRKKLLYIFKQPFMRPVQTTQEEDGCSCRFPEEEEGGCELRVKFSRSADAPAYQQGQNQLYNELNLGRREEYDVLDKRRGRDPEMGGKPRRKNPQEGLYNELQKDKMAEAYSEIGMKGERRRGKGHDGLYQGLSTATKDTYDALHMQALPPR

SEQ ID NO: 207359 - protein, 495 aa, Artificial Sequence
  Description of Artificial Sequence: Synthetic Chimeric Antigen Receptor
MALPVTALLLPLALLLHAARPQSALTQPALTQPASVSGSPGQSITISCTGTSSDFGDYDYVSWYQQHPGKAPKLMIYDVSDRPSGVSNRFSGSKSGNTASLTISGLQAEDEADYFCSSFTTSSTLVFGGGTKLTVLGGGGGSGGGGSGGGGSQVQLVQSGAEVKEPGASVKVSCKASGYTFRNSGITWVRQAPGQGLEWMGWINPNSGGAMYVDNFQGRATMTRDTSINTAYMELRSLSSDDTAVYYCARGMADLIDVFDIWGQGTLVTVSSTTTPAPRPPTPAPTIASQPLSLRPEACRPAAGGAVHTRGLDFACDIYIWAPLAGTCGVLLLSLVITLYCKRGRKKLLYIFKQPFMRPVQTTQEEDGCSCRFPEEEEGGCELRVKFSRSADAPAYQQGQNQLYNELNLGRREEYDVLDKRRGRDPEMGGKPRRKNPQEGLYNELQKDKMAEAYSEIGMKGERRRGKGHDGLYQGLSTATKDTYDALHMQALPPR

SEQ ID NO: 207360 - protein, 497 aa, Artificial Sequence
  Description of Artificial Sequence: Synthetic Chimeric Antigen Receptor
MALPVTALLLPLALLLHAARPEIVMTQSPATLSVSPGERATLSCRASQSVSSNLAWYQQKPGQAPRLLIYGASTRATGIPARFSGSGSGTEFTLTISSLQSEDFAVYYCQQYNNWPPYTFGQGTKVEIKRGGGGSGGGGSGGGGSQVTLKESGPTLVKPTQTLTLTCTFSGFSLNSFGVAVGWFRQPPGKALEWLGLIYWDDDRRYFPSLEGRLSITKDASDNNVVLTMMNVDPADTATYYCARTSPMVQGIANYYAMDVWGQGTTVTVSSAAATTTPAPRPPTPAPTIASQPLSLRPEACRPAAGGAVHTRGLDFACDIYIWAPLAGTCGVLLLSLVITLYCKRGRKKLLYIFKQPFMRPVQTTQEEDGCSCRFPEEEEGGCELRVKFSRSADAPAYQQGQNQLYNELNLGRREEYDVLDKRRGRDPEMGGKPRRKNPQEGLYNELQKDKMAEAYSEIGMKGERRRGKGHDGLYQGLSTATKDTYDALHMQALPPR

SEQ ID NO: 207361 - protein, 645 aa, Artificial Sequence
  Description of Artificial Sequence: Synthetic Chimeric Antigen Receptor
EVKLQQSGPELVKPGASVKISCKTSGYTFTEYTMHWVKQSHGKSLEWIGGINPNNGGTSYNQKFKGKATLTVDKSSSTAYMELRSLTSEDSAVYYCALQGFAYWGQGTPLTVSSGGGGSGGGGSGGGGSMEIEITQTPALMSASPGEKVTMTCSASSSVSYMYWYQQKPRSSPKPWIYLTSNLASGVPARFSGSGSGTSYSLTISSMEAEDAATYYCQQWSSNPYTFGGGTRLELKEPKSPDKTHTCPPCPAPPVAGPSVFLFPPKPKDTLMIARTPEVTCVVVDVSHEDPEVKFNWYVDGVEVHNAKTKPREEQYNSTYRVVSVLTVLHQDWLNGKEYKCKVSNKALPAPIEKTISKAKGQPREPQVYTLPPSRDELTKNQVSLTCLVKGFYPSDIAVEWESNGQPENNYKTTPPVLDSDGSFFLYSKLTVDKSRWQQGNVFSCSVMHEALHNHYTQKSLSLSPGKIYIWAPLAGTCGVLLLSLVITLYCKRGRKKLLYIFKQPFMRPVQTTQEEDGCSCRFPEEEEGGCELRVKFSRSADAPAYQQGQNQLYNELNLGRREEYDVLDKRRGRDPEMGGKPRRKNPQEGLYNELQKDKMAEAYSEIGMKGERRRGKGHDGLYQGLSTATKDTYDALHMQALPPR

SEQ ID NO: 207362 - protein, 647 aa, Artificial Sequence
  Description of Artificial Sequence: Synthetic Chimeric Antigen Receptor
QVQLKESGPGLVAPSQTLSITCTVSGFSLTSYGVHWVRQPPGKGLEWLGVIWAGGFTNYNSALKSRLSISKDNSKSQVLLKMTSLQTDDTAMYYCARRGSSYSMDYWGQGTSVTVSSGGGGSGGGGSGGGGSEIVLSQSPAITAASLGQKVTITCSASSNVSYIHWYQQRSGTSPRPWIYEISKLASGVPVRFSGSGSGTSYSLTISSMEAEDAAIYYCQQWNYPLITFGSGTKLEIQEPKSPDKTHTCPPCPAPPVAGPSVFLFPPKPKDTLMIARTPEVTCVVVDVSHEDPEVKFNWYVDGVEVHNAKTKPREEQYNSTYRVVSVLTVLHQDWLNGKEYKCKVSNKALPAPIEKTISKAKGQPREPQVYTLPPSRDELTKNQVSLTCLVKGFYPSDIAVEWESNGQPENNYKTTPPVLDSDGSFFLYSKLTVDKSRWQQGNVFSCSVMHEALHNHYTQKSLSLSPGKIYIWAPLAGTCGVLLLSLVITLYCKRGRKKLLYIFKQPFMRPVQTTQEEDGCSCRFPEEEEGGCELRVKFSRSADAPAYQQGQNQLYNELNLGRREEYDVLDKRRGRDPEMGGKPRRKNPQEGLYNELQKDKMAEAYSEIGMKGERRRGKGHDGLYQGLSTATKDTYDALHMQALPPR

SEQ ID NO: 207363 - protein, 648 aa, Artificial Sequence
  Description of Artificial Sequence: Synthetic Chimeric Antigen Receptor
EVKLQQSGPELVKPGASVKISCKTSGYTFTEYTMHWVKQSHGKSLEWIGGINPNNGGTSYNQKFKGKATLTVDKSSSTAYMELRSLTSEDSAVYYCALQGFAYWGQGTPLTVSSGGGGSGGGGSGGGGSMEIEITQTPALMSASPGEKVTMTCSASSSVSYMYWYQQKPRSSPKPWIYLTSNLASGVPARFSGSGSGTSYSLTISSMEAEDAATYYCQQWSSNPYTFGGGTRLELKEPKSPDKTHTCPPCPAPPVAGPSVFLFPPKPKDTLMIARTPEVTCVVVDVSHEDPEVKFNWYVDGVEVHNAKTKPREEQYNSTYRVVSVLTVLHQDWLNGKEYKCKVSNKALPAPIEKTISKAKGQPREPQVYTLPPSRDELTKNQVSLTCLVKGFYPSDIAVEWESNGQPENNYKTTPPVLDSDGSFFLYSKLTVDKSRWQQGNVFSCSVMHEALHNHYTQKSLSLSPGKIISFFLALTSTALLFLLFFLTLRFSVVKRGRKKLLYIFKQPFMRPVQTTQEEDGCSCRFPEEEEGGCELRVKFSRSADAPAYQQGQNQLYNELNLGRREEYDVLDKRRGRDPEMGGKPRRKNPQEGLYNELQKDKMAEAYSEIGMKGERRRGKGHDGLYQGLSTATKDTYDALHMQALPPR

SEQ ID NO: 207364 - protein, 649 aa, Artificial Sequence
  Description of Artificial Sequence: Synthetic Chimeric Antigen Receptor
EVKLVESGGGLVKPGGSLKLSCAASGFTFSSYAMSWVRQTPEKRLEWVASISTGASAYFPDSVKGRFTISRDNARNILYLQMSSLRSEDTAMYYCARITTSTWYFDVWGAGTTVTVSSGGGGSGGGGSGGGGSDIKMTQSPSSMYASLGERVTITCKASQDINSYLSWFQQKPGKSPKTLIYRANRLVDGVPSRFSGSGSGQDYSLTISSLEYEDMGIYYCLQYDEFPYTFGGGTKLEIKEPKSPDKTHTCPPCPAPPVAGPSVFLFPPKPKDTLMIARTPEVTCVVVDVSHEDPEVKFNWYVDGVEVHNAKTKPREEQYNSTYRVVSVLTVLHQDWLNGKEYKCKVSNKALPAPIEKTISKAKGQPREPQVYTLPPSRDELTKNQVSLTCLVKGFYPSDIAVEWESNGQPENNYKTTPPVLDSDGSFFLYSKLTVDKSRWQQGNVFSCSVMHEALHNHYTQKSLSLSPGKIYIWAPLAGTCGVLLLSLVITLYCKRGRKKLLYIFKQPFMRPVQTTQEEDGCSCRFPEEEEGGCELRVKFSRSADAPAYQQGQNQLYNELNLGRREEYDVLDKRRGRDPEMGGKPRRKNPQEGLYNELQKDKMAEAYSEIGMKGERRRGKGHDGLYQGLSTATKDTYDALHMQALPPR

SEQ ID NO: 207365 - protein, 649 aa, Artificial Sequence
  Description of Artificial Sequence: Synthetic Chimeric Antigen Receptor
QVQLQQSGAELVRPGASVTLSCKASGYTFSDYEMHWVIQTPVHGLEWIGAIDPETGGTAYNQKFKGKAILTADKSSSTAYMELRSLTSEDSAVYYCTGYYDYDSFTYWGQGTLVTVSAGGGGSGGGGSGGGGSDIVMTQSQKIMSTTVGDRVSITCKASQNVDAAVAWYQQKPGQSPKLLIYSASNRYTGVPDRFTGSGSGTDFTLTISNMQSEDLADYFCQQYDIYPYTFGGGTKLEIKEPKSPDKTHTCPPCPAPPVAGPSVFLFPPKPKDTLMIARTPEVTCVVVDVSHEDPEVKFNWYVDGVEVHNAKTKPREEQYNSTYRVVSVLTVLHQDWLNGKEYKCKVSNKALPAPIEKTISKAKGQPREPQVYTLPPSRDELTKNQVSLTCLVKGFYPSDIAVEWESNGQPENNYKTTPPVLDSDGSFFLYSKLTVDKSRWQQGNVFSCSVMHEALHNHYTQKSLSLSPGKIYIWAPLAGTCGVLLLSLVITLYCKRGRKKLLYIFKQPFMRPVQTTQEEDGCSCRFPEEEEGGCELRVKFSRSADAPAYQQGQNQLYNELNLGRREEYDVLDKRRGRDPEMGGKPRRKNPQEGLYNELQKDKMAEAYSEIGMKGERRRGKGHDGLYQGLSTATKDTYDALHMQALPPR

SEQ ID NO: 207366 - protein, 650 aa, Artificial Sequence
  Description of Artificial Sequence: Synthetic Chimeric Antigen Receptor
EVKLVESGGGLVKPGGSLKLSCAASGFTFSSYAMSWVRQIPEKRLEWVASISRGGTTYYPDSVKGRFTISRDNVRNILYLQMSSLRSEDTAMYYCGRYDYDGYYAMDYWGQGTSVTVSSGGGGSGGGGSGGGGSDIKMTQSPSSMYASLGERVTITCKASPDINSYLSWFQQKPGKSPKTLIYRANRLVDGVPSRFSGGGSGQDYSLTINSLEYEDMGIYYCLQYDEFPYTFGGGTKLEMKEPKSPDKTHTCPPCPAPPVAGPSVFLFPPKPKDTLMIARTPEVTCVVVDVSHEDPEVKFNWYVDGVEVHNAKTKPREEQYNSTYRVVSVLTVLHQDWLNGKEYKCKVSNKALPAPIEKTISKAKGQPREPQVYTLPPSRDELTKNQVSLTCLVKGFYPSDIAVEWESNGQPENNYKTTPPVLDSDGSFFLYSKLTVDKSRWQQGNVFSCSVMHEALHNHYTQKSLSLSPGKIYIWAPLAGTCGVLLLSLVITLYCKRGRKKLLYIFKQPFMRPVQTTQEEDGCSCRFPEEEEGGCELRVKFSRSADAPAYQQGQNQLYNELNLGRREEYDVLDKRRGRDPEMGGKPRRKNPQEGLYNELQKDKMAEAYSEIGMKGERRRGKGHDGLYQGLSTATKDTYDALHMQALPPR

SEQ ID NO: 207367 - protein, 650 aa, Artificial Sequence
  Description of Artificial Sequence: Synthetic Chimeric Antigen Receptor
EVQLQQSGPELEKPGASVKISCKASGFAFTGYNMNWVKQTNGKSLEWIGSIDPYYGGSTYNQKFKDKATLTVDKSSSTAYMQLKSLTSDDSAVYYCARSPGGDYAMDYWGQGTSVTVSSGGGGSGGGGSGGGGSDIKMTQSPSSMYASVGERVTITCKASQGINSYSGWFQQKPGKSPKTLIYRGNRLVDGVPSRFSGSGSGQDYSLTISSLEYEDMGIYYCLQYDEFPYTFGGGTKLEIKEPKSPDKTHTCPPCPAPPVAGPSVFLFPPKPKDTLMIARTPEVTCVVVDVSHEDPEVKFNWYVDGVEVHNAKTKPREEQYNSTYRVVSVLTVLHQDWLNGKEYKCKVSNKALPAPIEKTISKAKGQPREPQVYTLPPSRDELTKNQVSLTCLVKGFYPSDIAVEWESNGQPENNYKTTPPVLDSDGSFFLYSKLTVDKSRWQQGNVFSCSVMHEALHNHYTQKSLSLSPGKIYIWAPLAGTCGVLLLSLVITLYCKRGRKKLLYIFKQPFMRPVQTTQEEDGCSCRFPEEEEGGCELRVKFSRSADAPAYQQGQNQLYNELNLGRREEYDVLDKRRGRDPEMGGKPRRKNPQEGLYNELQKDKMAEAYSEIGMKGERRRGKGHDGLYQGLSTATKDTYDALHMQALPPR

SEQ ID NO: 207368 - protein, 650 aa, Artificial Sequence
  Description of Artificial Sequence: Synthetic Chimeric Antigen Receptor
QVQLKESGPGLVAPSQTLSITCTVSGFSLTSYGVHWVRQPPGKGLEWLGVIWAGGFTNYNSALKSRLSISKDNSKSQVLLKMTSLQTDDTAMYYCARRGSSYSMDYWGQGTSVTVSSGGGGSGGGGSGGGGSEIVLSQSPAITAASLGQKVTITCSASSNVSYIHWYQQRSGTSPRPWIYEISKLASGVPVRFSGSGSGTSYSLTISSMEAEDAAIYYCQQWNYPLITFGSGTKLEIQEPKSPDKTHTCPPCPAPPVAGPSVFLFPPKPKDTLMIARTPEVTCVVVDVSHEDPEVKFNWYVDGVEVHNAKTKPREEQYNSTYRVVSVLTVLHQDWLNGKEYKCKVSNKALPAPIEKTISKAKGQPREPQVYTLPPSRDELTKNQVSLTCLVKGFYPSDIAVEWESNGQPENNYKTTPPVLDSDGSFFLYSKLTVDKSRWQQGNVFSCSVMHEALHNHYTQKSLSLSPGKIISFFLALTSTALLFLLFFLTLRFSVVKRGRKKLLYIFKQPFMRPVQTTQEEDGCSCRFPEEEEGGCELRVKFSRSADAPAYQQGQNQLYNELNLGRREEYDVLDKRRGRDPEMGGKPRRKNPQEGLYNELQKDKMAEAYSEIGMKGERRRGKGHDGLYQGLSTATKDTYDALHMQALPPR

SEQ ID NO: 207369 - protein, 650 aa, Artificial Sequence
  Description of Artificial Sequence: Synthetic Chimeric Antigen Receptor
QVQLQQPGAELVKPGTSVKLSCKASGYNFTNYWINWVKLRPGQGLEWIGEIYPGSGSTNYNEKFKSKATLTADTSSSTAYMQLSSLASEDSALYYCARDGNYYAMDYWGQGTSVTVSSGGGGSGGGGSGGGGSDIQMTQTTSSLSASLGDRVTITCRASQDINNYLNWYQQKPDGTVKLLIYYTSALHSGVPSRFSGSGSGTDYSLTISNLEQEDIATYFCQQGNTLPPYTFGGGTKLEIKEPKSPDKTHTCPPCPAPPVAGPSVFLFPPKPKDTLMIARTPEVTCVVVDVSHEDPEVKFNWYVDGVEVHNAKTKPREEQYNSTYRVVSVLTVLHQDWLNGKEYKCKVSNKALPAPIEKTISKAKGQPREPQVYTLPPSRDELTKNQVSLTCLVKGFYPSDIAVEWESNGQPENNYKTTPPVLDSDGSFFLYSKLTVDKSRWQQGNVFSCSVMHEALHNHYTQKSLSLSPGKIYIWAPLAGTCGVLLLSLVITLYCKRGRKKLLYIFKQPFMRPVQTTQEEDGCSCRFPEEEEGGCELRVKFSRSADAPAYQQGQNQLYNELNLGRREEYDVLDKRRGRDPEMGGKPRRKNPQEGLYNELQKDKMAEAYSEIGMKGERRRGKGHDGLYQGLSTATKDTYDALHMQALPPR

SEQ ID NO: 207370 - protein, 651 aa, Artificial Sequence
  Description of Artificial Sequence: Synthetic Chimeric Antigen Receptor
EVKLQESGAELARPGASVKMSCKASGYTFTSYTMHWVKQRPGQGLEWIGYINPSSGYTEYNQKFKDKTTLTADKSSSTAYMQLSSLTSGDSAVYYCARRVLWLRRGDYWGQGTILTVSAGGGGSGGGGSGGGGSMEVLITQTPSSLSASLGERVSLTCRASQDIGSSLNWLQQEPDGTIKRLIYATSSLDSGVPKRFSGSRSGSDYSLTISSLESEDFVDYYCLQYASSPYTFGGGTKLELKEPKSPDKTHTCPPCPAPPVAGPSVFLFPPKPKDTLMIARTPEVTCVVVDVSHEDPEVKFNWYVDGVEVHNAKTKPREEQYNSTYRVVSVLTVLHQDWLNGKEYKCKVSNKALPAPIEKTISKAKGQPREPQVYTLPPSRDELTKNQVSLTCLVKGFYPSDIAVEWESNGQPENNYKTTPPVLDSDGSFFLYSKLTVDKSRWQQGNVFSCSVMHEALHNHYTQKSLSLSPGKIYIWAPLAGTCGVLLLSLVITLYCKRGRKKLLYIFKQPFMRPVQTTQEEDGCSCRFPEEEEGGCELRVKFSRSADAPAYQQGQNQLYNELNLGRREEYDVLDKRRGRDPEMGGKPRRKNPQEGLYNELQKDKMAEAYSEIGMKGERRRGKGHDGLYQGLSTATKDTYDALHMQALPPR

SEQ ID NO: 207371 - protein, 652 aa, Artificial Sequence
  Description of Artificial Sequence: Synthetic Chimeric Antigen Receptor
EVKLVESGGGLVKPGGSLKLSCAASGFTFSSYAMSWVRQTPEKRLEWVASISTGASAYFPDSVKGRFTISRDNARNILYLQMSSLRSEDTAMYYCARITTSTWYFDVWGAGTTVTVSSGGGGSGGGGSGGGGSDIKMTQSPSSMYASLGERVTITCKASQDINSYLSWFQQKPGKSPKTLIYRANRLVDGVPSRFSGSGSGQDYSLTISSLEYEDMGIYYCLQYDEFPYTFGGGTKLEIKEPKSPDKTHTCPPCPAPPVAGPSVFLFPPKPKDTLMIARTPEVTCVVVDVSHEDPEVKFNWYVDGVEVHNAKTKPREEQYNSTYRVVSVLTVLHQDWLNGKEYKCKVSNKALPAPIEKTISKAKGQPREPQVYTLPPSRDELTKNQVSLTCLVKGFYPSDIAVEWESNGQPENNYKTTPPVLDSDGSFFLYSKLTVDKSRWQQGNVFSCSVMHEALHNHYTQKSLSLSPGKIISFFLALTSTALLFLLFFLTLRFSVVKRGRKKLLYIFKQPFMRPVQTTQEEDGCSCRFPEEEEGGCELRVKFSRSADAPAYQQGQNQLYNELNLGRREEYDVLDKRRGRDPEMGGKPRRKNPQEGLYNELQKDKMAEAYSEIGMKGERRRGKGHDGLYQGLSTATKDTYDALHMQALPPR

SEQ ID NO: 207372 - protein, 652 aa, Artificial Sequence
  Description of Artificial Sequence: Synthetic Chimeric Antigen Receptor
QVQLQQSGAELVRPGASVTLSCKASGYTFSDYEMHWVIQTPVHGLEWIGAIDPETGGTAYNQKFKGKAILTADKSSSTAYMELRSLTSEDSAVYYCTGYYDYDSFTYWGQGTLVTVSAGGGGSGGGGSGGGGSDIVMTQSQKIMSTTVGDRVSITCKASQNVDAAVAWYQQKPGQSPKLLIYSASNRYTGVPDRFTGSGSGTDFTLTISNMQSEDLADYFCQQYDIYPYTFGGGTKLEIKEPKSPDKTHTCPPCPAPPVAGPSVFLFPPKPKDTLMIARTPEVTCVVVDVSHEDPEVKFNWYVDGVEVHNAKTKPREEQYNSTYRVVSVLTVLHQDWLNGKEYKCKVSNKALPAPIEKTISKAKGQPREPQVYTLPPSRDELTKNQVSLTCLVKGFYPSDIAVEWESNGQPENNYKTTPPVLDSDGSFFLYSKLTVDKSRWQQGNVFSCSVMHEALHNHYTQKSLSLSPGKIISFFLALTSTALLFLLFFLTLRFSVVKRGRKKLLYIFKQPFMRPVQTTQEEDGCSCRFPEEEEGGCELRVKFSRSADAPAYQQGQNQLYNELNLGRREEYDVLDKRRGRDPEMGGKPRRKNPQEGLYNELQKDKMAEAYSEIGMKGERRRGKGHDGLYQGLSTATKDTYDALHMQALPPR

SEQ ID NO: 207373 - protein, 653 aa, Artificial Sequence
  Description of Artificial Sequence: Synthetic Chimeric Antigen Receptor
EVKLVESGGGLVKPGGSLKLSCAASGFTFSSYAMSWVRQIPEKRLEWVASISRGGTTYYPDSVKGRFTISRDNVRNILYLQMSSLRSEDTAMYYCGRYDYDGYYAMDYWGQGTSVTVSSGGGGSGGGGSGGGGSDIKMTQSPSSMYASLGERVTITCKASPDINSYLSWFQQKPGKSPKTLIYRANRLVDGVPSRFSGGGSGQDYSLTINSLEYEDMGIYYCLQYDEFPYTFGGGTKLEMKEPKSPDKTHTCPPCPAPPVAGPSVFLFPPKPKDTLMIARTPEVTCVVVDVSHEDPEVKFNWYVDGVEVHNAKTKPREEQYNSTYRVVSVLTVLHQDWLNGKEYKCKVSNKALPAPIEKTISKAKGQPREPQVYTLPPSRDELTKNQVSLTCLVKGFYPSDIAVEWESNGQPENNYKTTPPVLDSDGSFFLYSKLTVDKSRWQQGNVFSCSVMHEALHNHYTQKSLSLSPGKIISFFLALTSTALLFLLFFLTLRFSVVKRGRKKLLYIFKQPFMRPVQTTQEEDGCSCRFPEEEEGGCELRVKFSRSADAPAYQQGQNQLYNELNLGRREEYDVLDKRRGRDPEMGGKPRRKNPQEGLYNELQKDKMAEAYSEIGMKGERRRGKGHDGLYQGLSTATKDTYDALHMQALPPR

SEQ ID NO: 207374 - protein, 653 aa, Artificial Sequence
  Description of Artificial Sequence: Synthetic Chimeric Antigen Receptor
EVQLQQSGPELEKPGASVKISCKASGFAFTGYNMNWVKQTNGKSLEWIGSIDPYYGGSTYNQKFKDKATLTVDKSSSTAYMQLKSLTSDDSAVYYCARSPGGDYAMDYWGQGTSVTVSSGGGGSGGGGSGGGGSDIKMTQSPSSMYASVGERVTITCKASQGINSYSGWFQQKPGKSPKTLIYRGNRLVDGVPSRFSGSGSGQDYSLTISSLEYEDMGIYYCLQYDEFPYTFGGGTKLEIKEPKSPDKTHTCPPCPAPPVAGPSVFLFPPKPKDTLMIARTPEVTCVVVDVSHEDPEVKFNWYVDGVEVHNAKTKPREEQYNSTYRVVSVLTVLHQDWLNGKEYKCKVSNKALPAPIEKTISKAKGQPREPQVYTLPPSRDELTKNQVSLTCLVKGFYPSDIAVEWESNGQPENNYKTTPPVLDSDGSFFLYSKLTVDKSRWQQGNVFSCSVMHEALHNHYTQKSLSLSPGKIISFFLALTSTALLFLLFFLTLRFSVVKRGRKKLLYIFKQPFMRPVQTTQEEDGCSCRFPEEEEGGCELRVKFSRSADAPAYQQGQNQLYNELNLGRREEYDVLDKRRGRDPEMGGKPRRKNPQEGLYNELQKDKMAEAYSEIGMKGERRRGKGHDGLYQGLSTATKDTYDALHMQALPPR

SEQ ID NO: 207375 - protein, 653 aa, Artificial Sequence
  Description of Artificial Sequence: Synthetic Chimeric Antigen Receptor
QVQLQQPGAELVKPGTSVKLSCKASGYNFTNYWINWVKLRPGQGLEWIGEIYPGSGSTNYNEKFKSKATLTADTSSSTAYMQLSSLASEDSALYYCARDGNYYAMDYWGQGTSVTVSSGGGGSGGGGSGGGGSDIQMTQTTSSLSASLGDRVTITCRASQDINNYLNWYQQKPDGTVKLLIYYTSALHSGVPSRFSGSGSGTDYSLTISNLEQEDIATYFCQQGNTLPPYTFGGGTKLEIKEPKSPDKTHTCPPCPAPPVAGPSVFLFPPKPKDTLMIARTPEVTCVVVDVSHEDPEVKFNWYVDGVEVHNAKTKPREEQYNSTYRVVSVLTVLHQDWLNGKEYKCKVSNKALPAPIEKTISKAKGQPREPQVYTLPPSRDELTKNQVSLTCLVKGFYPSDIAVEWESNGQPENNYKTTPPVLDSDGSFFLYSKLTVDKSRWQQGNVFSCSVMHEALHNHYTQKSLSLSPGKIISFFLALTSTALLFLLFFLTLRFSVVKRGRKKLLYIFKQPFMRPVQTTQEEDGCSCRFPEEEEGGCELRVKFSRSADAPAYQQGQNQLYNELNLGRREEYDVLDKRRGRDPEMGGKPRRKNPQEGLYNELQKDKMAEAYSEIGMKGERRRGKGHDGLYQGLSTATKDTYDALHMQALPPR

SEQ ID NO: 207376 - protein, 654 aa, Artificial Sequence
  Description of Artificial Sequence: Synthetic Chimeric Antigen Receptor
EVKLQESGAELARPGASVKMSCKASGYTFTSYTMHWVKQRPGQGLEWIGYINPSSGYTEYNQKFKDKTTLTADKSSSTAYMQLSSLTSGDSAVYYCARRVLWLRRGDYWGQGTILTVSAGGGGSGGGGSGGGGSMEVLITQTPSSLSASLGERVSLTCRASQDIGSSLNWLQQEPDGTIKRLIYATSSLDSGVPKRFSGSRSGSDYSLTISSLESEDFVDYYCLQYASSPYTFGGGTKLELKEPKSPDKTHTCPPCPAPPVAGPSVFLFPPKPKDTLMIARTPEVTCVVVDVSHEDPEVKFNWYVDGVEVHNAKTKPREEQYNSTYRVVSVLTVLHQDWLNGKEYKCKVSNKALPAPIEKTISKAKGQPREPQVYTLPPSRDELTKNQVSLTCLVKGFYPSDIAVEWESNGQPENNYKTTPPVLDSDGSFFLYSKLTVDKSRWQQGNVFSCSVMHEALHNHYTQKSLSLSPGKIISFFLALTSTALLFLLFFLTLRFSVVKRGRKKLLYIFKQPFMRPVQTTQEEDGCSCRFPEEEEGGCELRVKFSRSADAPAYQQGQNQLYNELNLGRREEYDVLDKRRGRDPEMGGKPRRKNPQEGLYNELQKDKMAEAYSEIGMKGERRRGKGHDGLYQGLSTATKDTYDALHMQALPPR

SEQ ID NO: 207377 - protein, 669 aa, Artificial Sequence
  Description of Artificial Sequence: Synthetic Chimeric Antigen Receptor
MALPVTALLLPLALLLHAARPQVQLQESGPGLVKPSETLSLTCTVSGFSLTSYGYVHWVRQPPGKGLEWLGVIWAGGFTNYNPSLKSRLTISKDNSKNQVSLKLSSVTAADTAVYYCARRGSSYSMDYWGQGTLVTVSSGGGGSGGGGSGGGGSEIVLTQSPATLSLSPGERATLSCRASSNVSYIHWYQQKPGQAPRPWIYEISKLATGIPARFSGSGSGTDYTLTISSLEPEDFAVYYCQQWNYPLITFGQGTKLEIKEPKSPDKTHTCPPCPAPPVAGPSVFLFPPKPKDTLMIARTPEVTCVVVDVSHEDPEVKFNWYVDGVEVHNAKTKPREEQYNSTYRVVSVLTVLHQDWLNGKEYKCKVSNKALPAPIEKTISKAKGQPREPQVYTLPPSRDELTKNQVSLTCLVKGFYPSDIAVEWESNGQPENNYKTTPPVLDSDGSFFLYSKLTVDKSRWQQGNVFSCSVMHEALHNHYTQKSLSLSPGKIYIWAPLAGTCGVLLLSLVITLYCKRGRKKLLYIFKQPFMRPVQTTQEEDGCSCRFPEEEEGGCELRVKFSRSADAPAYQQGQNQLYNELNLGRREEYDVLDKRRGRDPEMGGKPRRKNPQEGLYNELQKDKMAEAYSEIGMKGERRRGKGHDGLYQGLSTATKDTYDALHMQALPPR

SEQ ID NO: 207378 - protein, 670 aa, Artificial Sequence
  Description of Artificial Sequence: Synthetic Chimeric Antigen Receptor
MALPVTALLLPLALLLHAARPEVQLVESGGGLVKPGGSLRLSCAASGFTFSSYAMSWVRQAPGKGLEWVASISTGASAYFADSVKGRFTISRDNAKNSLYLQMNSLRAEDTAVYYCARITTSTWYFDVWGQGTTVTVSSGGGGSGGGGSGGGGSDIQMTQSPSSLSASVGDRVTITCRASQDINSYLSWFQQKPGKAPKTLIYRANRLQSGVPSRFSGSGSGQDYTLTISSLQPEDFATYYCLQYDEFPYTFGQGTKLEIKEPKSPDKTHTCPPCPAPPVAGPSVFLFPPKPKDTLMIARTPEVTCVVVDVSHEDPEVKFNWYVDGVEVHNAKTKPREEQYNSTYRVVSVLTVLHQDWLNGKEYKCKVSNKALPAPIEKTISKAKGQPREPQVYTLPPSRDELTKNQVSLTCLVKGFYPSDIAVEWESNGQPENNYKTTPPVLDSDGSFFLYSKLTVDKSRWQQGNVFSCSVMHEALHNHYTQKSLSLSPGKIYIWAPLAGTCGVLLLSLVITLYCKRGRKKLLYIFKQPFMRPVQTTQEEDGCSCRFPEEEEGGCELRVKFSRSADAPAYQQGQNQLYNELNLGRREEYDVLDKRRGRDPEMGGKPRRKNPQEGLYNELQKDKMAEAYSEIGMKGERRRGKGHDGLYQGLSTATKDTYDALHMQALPPR

SEQ ID NO: 207379 - protein, 672 aa, Artificial Sequence
  Description of Artificial Sequence: Synthetic Chimeric Antigen Receptor
MALPVTALLLPLALLLHAARPQVQLQESGPGLVKPSETLSLTCTVSGFSLTSYGYVHWVRQPPGKGLEWLGVIWAGGFTNYNPSLKSRLTISKDNSKNQVSLKLSSVTAADTAVYYCARRGSSYSMDYWGQGTLVTVSSGGGGSGGGGSGGGGSEIVLTQSPATLSLSPGERATLSCRASSNVSYIHWYQQKPGQAPRPWIYEISKLATGIPARFSGSGSGTDYTLTISSLEPEDFAVYYCQQWNYPLITFGQGTKLEIKEPKSPDKTHTCPPCPAPPVAGPSVFLFPPKPKDTLMIARTPEVTCVVVDVSHEDPEVKFNWYVDGVEVHNAKTKPREEQYNSTYRVVSVLTVLHQDWLNGKEYKCKVSNKALPAPIEKTISKAKGQPREPQVYTLPPSRDELTKNQVSLTCLVKGFYPSDIAVEWESNGQPENNYKTTPPVLDSDGSFFLYSKLTVDKSRWQQGNVFSCSVMHEALHNHYTQKSLSLSPGKIISFFLALTSTALLFLLFFLTLRFSVVKRGRKKLLYIFKQPFMRPVQTTQEEDGCSCRFPEEEEGGCELRVKFSRSADAPAYQQGQNQLYNELNLGRREEYDVLDKRRGRDPEMGGKPRRKNPQEGLYNELQKDKMAEAYSEIGMKGERRRGKGHDGLYQGLSTATKDTYDALHMQALPPR

SEQ ID NO: 207380 - protein, 673 aa, Artificial Sequence
  Description of Artificial Sequence: Synthetic Chimeric Antigen Receptor
MALPVTALLLPLALLLHAARPEVQLVESGGGLVKPGGSLRLSCAASGFTFSSYAMSWVRQAPGKGLEWVASISTGASAYFADSVKGRFTISRDNAKNSLYLQMNSLRAEDTAVYYCARITTSTWYFDVWGQGTTVTVSSGGGGSGGGGSGGGGSDIQMTQSPSSLSASVGDRVTITCRASQDINSYLSWFQQKPGKAPKTLIYRANRLQSGVPSRFSGSGSGQDYTLTISSLQPEDFATYYCLQYDEFPYTFGQGTKLEIKEPKSPDKTHTCPPCPAPPVAGPSVFLFPPKPKDTLMIARTPEVTCVVVDVSHEDPEVKFNWYVDGVEVHNAKTKPREEQYNSTYRVVSVLTVLHQDWLNGKEYKCKVSNKALPAPIEKTISKAKGQPREPQVYTLPPSRDELTKNQVSLTCLVKGFYPSDIAVEWESNGQPENNYKTTPPVLDSDGSFFLYSKLTVDKSRWQQGNVFSCSVMHEALHNHYTQKSLSLSPGKIISFFLALTSTALLFLLFFLTLRFSVVKRGRKKLLYIFKQPFMRPVQTTQEEDGCSCRFPEEEEGGCELRVKFSRSADAPAYQQGQNQLYNELNLGRREEYDVLDKRRGRDPEMGGKPRRKNPQEGLYNELQKDKMAEAYSEIGMKGERRRGKGHDGLYQGLSTATKDTYDALHMQALPPR

SEQ ID NO: 207381 - protein, 689 aa, Artificial Sequence
  Description of Artificial Sequence: Synthetic Chimeric Antigen Receptor
TAMDFQVQIFSFLLISASVIMSREVQLVETGGGLVQPGKSLELTCATSGFTFNTAWMHWVRQSPDKRLEWIARIKDTSNNYATDYVESMKGRFTISRDDSKGSVNLQMNSLKEEDTATYYCTTDFYDGTYYWNYWGQGVMVTVSSGGGGSGGGGSGGGGSSYELIQPPSAAVTLGNTVSLTCVGDELPKRYAYWYQQKPDQSIVRVIYEDSVRPPGISDRFSGSSSGTTATLTIRDAQNEDEADYYCQSTYGDDKLYIFGGGTKLTVLGDPAEPKSPDKTHTCPPCPAPELLGGPSVFLFPPKPKDTLMISRTPEVTCVVVDVSHEDPEVKFNWYVDGVEVHNAKTKPREEQYNSTYRVVSVLTVLHQDWLNGKEYKCKVSNKALPAPIEKTISKAKGQPREPQVYTLPPSRDELTKNQVSLTCLVKGFYPSDIAVEWESNGQPENNYKTTPPVLDSDGSFFLYSKLTVDKSRWQQGNVFSCSVMHEALHNHYTQKSLSLSPGKKDPKFWVLVVVGGVLACYSLLVTVAFIIFWVRSKRSRLLHSDYMNMTPRRPGPTRKHYQPYAPPRDFAAYRSLRVKFSRSADAPAYQQGQNQLYNELNLGRREEYDVLDKRRGRDPEMGGKPRRKNPQEGLYNELQKDKMAEAYSEIGMKGERRRGKGHDGLYQGLSTATKDTYDALHMQALPPR

SEQ ID NO: 207382 - protein, 679 aa, Artificial Sequence
  Description of Artificial Sequence: Synthetic Chimeric Antigen Receptor
MDFQVQIFSFLLISASVIMSRQVQLKESGPGLVAPSQSLSITCTVSGFSLSSQGVYWVRQPPGKGLEWLGAIWAGGSTNYNSALMSRLSISKDNSKSQVFLKMNSLQTDDTAMYYCARVDGYRGYNMDYWGQGTSVTVSSGGGGSGGGGSGGGGSENVLTQSPAIMSASPGEKVTMTCSASSSVSYMHWYQQKSSTSPKLWIYDTSKLASGVPGRFSGSGSGNSYSLTISSMEAEDVATYYCFQGSGYPLTFGAGTKLELKAAALPAEPKSPDKTHTCPPCPAPPVAGPSVFLFPPKPKDTLMIARTPEVTCVVVDVSHEDPEVKFNWYVDGVEVHNAKTKPREEQYNSTYRVVSVLTVLHQDWLNGKEYKCKVSNKALPAPIEKTISKAKGQPREPQVYTLPPSRDELTKNQVSLTCLVKGFYPSDIAVEWESNGQPENNYKTTPPVLDSDGSFFLYSKLTVDKSRWQQGNVFSCSVMHEALHNHYTQKSLSSLSPGKKIYIWAPLAGTCGVLLLSLVITLYCKRGRKKLLYIFKQPFMRPVQTTQEEDGCSCRFPEEEEGGCELLRVKFSRSADAPAYQQGQNQLYNELNLGRREEYDVLDKRRGRDPEMGGKPRRKNPQEGLYNELQKDKMAEAYSEIGMKGERRRGKGHDGLYQGLSTATKDTYDALHMQALPPR

SEQ ID NO: 207383 - protein, 383 aa, Artificial Sequence
  Description of Artificial Sequence: Synthetic polypeptide
MALPVTALLLPLALLLHAARPQVQLQQSGPELEKPGASVKISCKASGYSFTGYTMNWVKQSHGKSLEWIGLITPYNGASSYNQKFRGKATLTVDKSSSTAYMDLLSLTSEDSAVYFCARGGYDGRGFDYWGQGTTVTVSSGGGGSGGGGSGGGGSDIELTQSPAIMSASPGEKVTMTCSASSSVSYMHWYQQKSGTSPKRWIYDTSKLASGVPGRFSGSGSGNSYSLTISSVEAEDDATYYCQQWSGYPLTFGAGTKLEITTTPAPRPPTPAPTIASQPLSLRPEACRPAAGGAVHTRGLDFACDIYIWAPLAGTCGVLLLSLVITLYCKRGRKKLLYIFKQPFMRPVQTTQEEDGCSCRFPEEEEGGCELRVKFSRSADAPA

SEQ ID NO: 207384 - protein, 458 aa, Artificial Sequence
  Description of Artificial Sequence: Synthetic Chimeric Antigen Receptor
MALPVTALLLPLALLLHAARPEVQLQQSGPDLVKPGASVKISCKASGYSFTGYYMHWVKQSHGKSLEWIGRINPNNGVTLYNQKFKDKAILTVDKSSTTAYMELRSLTSEDSAVYYCARSTMITNYVMDYWGQVTSVTVSSGGGGSGGGGSGGGGSSIVMTQTPTFLLVSAGDRVTITCKASQSVSNDVAWYQQKPGQSPTLLISYTSSRYAGVPDRFIGSGYGTDFTFTISTLQAEDLAVYFCQQDYNSPPTFGGGTKLEIKRGLAVSTISSFFPPGYQIYIWAPLAGTCGVLLLSLVITLYCKRGRKKLLYIFKQPFMRPVQTTQEEDGCSCRFPEEEEGGCELRVKFSRSADAPAYQQGQNQLYNELNLGRREEYDVLDKRRGRDPEMGGKPRRKNPQEGLYNELQKDKMAEAYSEIGMKGERRRGKGHDGLYQGLSTATKDTYDALHMQALPPR

SEQ ID NO: 207385 - protein, 679 aa, Artificial Sequence
  Description of Artificial Sequence: Synthetic Chimeric Antigen Receptor
MDFQVQIFSFLLISASVIMSRENVLTQSPAIMSASPGEKVTMTCSASSSVSYMHWYQQKSSTSPKLWIYDTSKLASGVPGRFSGSGSGNSYSLTISSMEAEDVATYYCFQGSGYPLTFGAGTKLELKGGGGSGGGGSGGGGSQVQLKESGPGLVAPSQSLSITCTVSGFSLSSQGVYWVRQPPGKGLEWLGAIWAGGSTNYNSALMSRLSISKDNSKSQVFLKMNSLQTDDTAMYYCARVDGYRGYNMDYWGQGTSVTVSSAAALPAEPKSPDKTHTCPPCPAPPVAGPSVFLFPPKPKDTLMIARTPEVTCVVVDVSHEDPEVKFNWYVDGVEVHNAKTKPREEQYNSTYRVVSVLTVLHQDWLNGKEYKCKVSNKALPAPIEKTISKAKGQPREPQVYTLPPSRDELTKNQVSLTCLVKGFYPSDIAVEWESNGQPENNYKTTPPVLDSDGSFFLYSKLTVDKSRWQQGNVFSCSVMHEALHNHYTQKSLSSLSPGKKIYIWAPLAGTCGVLLLSLVITLYCKRGRKKLLYIFKQPFMRPVQTTQEEDGCSCRFPEEEEGGCELLRVKFSRSADAPAYQQGQNQLYNELNLGRREEYDVLDKRRGRDPEMGGKPRRKNPQEGLYNELQKDKMAEAYSEIGMKGERRRGKGHDGLYQGLSTATKDTYDALHMQALPPR

SEQ ID NO: 207386 - protein, 1345 aa, Artificial Sequence
  Description of Artificial Sequence: Synthetic Chimeric Antigen Receptor
MSLPVTALLLPLALLLHAARPDIQMTQTTSSLSASLGDRVTISCRASQDISKYLNWYQQKPDGTVKLLIYHTSRLHSGVPSRFSGSGSGTDYSLTISNLEQEDIATYFCQQGNTLPYTFGGGTKLEITKAGGGGSGGGGSGGGGSGGGGSEVKLQESGPGLVAPSQSLSVTCTVSGVSLPDYGVSWIRQPPRKGLEWLGVIWGSETTYYNSALKSRLTIIKDNSKSQVFLKMNSLQTDDTAIYYCAKHYYYGGSYAMDYWGQGTSVTVSSDPTTTPAPRPPTPAPTIASQPLSLRPEACRPAAGGAVHTRGLDFACDIFVLVWGGVLACYSLLVTVAFIIFVVVRRVKFSRSADAPAYQQGQNQLYNELNLGRREEYDVLDKRRGRDPEMGGKPRRKNPQEGLYNELQKDKMAEAYSEIGMKGERRRGKGHDGLYQGLSTATKDTYDALHMQALPPRRAEGRGSLLTCGDVEENPGPMAVPTQVLGLLLLWLTDARCDIQMTQSPSSLSASVGDRVTITCRASEDIYFNLVWYQQKPGKAPKLLIYDTNRLADGVPSRFSGSGSGTQYTLTISSLQPEDFATYYCQHYKNYPLTFGQGTKLEIKRSGGGGSGGGGSGGGGSGGGGSRSEVQLVESGGGLVQPGGSLRLSCAASGFTLSNYGMHWIRQAPGKGLEWVSSISLNGGSTYYRDSVKGRFTISRDNAKSTLYLQMNSLRAEDTAVYYCAAQDAYTGGYFDYWGQGTLVTVSSMDPAEPKSPDKTHTCPPCPAPPVAGPSVFLFPPKPKDTLMIARTPEVTCVWDVSHEDPEVKFNWYVDGVEVHNAKTKPREEQYNSTYRWSVLTVLHQDWLNGKEYKCKVSNALPAPIEKTISKAKGQPREPQVYTLPPSRDELTNQVSLTCLVKGFYPSDIAVEWESNGQPENNYKTTPPVLDSDGSFFLYSKLTVDKSRWQQGNVFSCSVMHEALHNHYTQKSLSLSPGKKDPKAVFGCIFGALVIVTVGGFIFWRKKRKDAKNNEVSFSQIKPKKSKLIRVENFEAYFKKQQADSNCGFAEEYEDLKLVGISQPKYAAELAENRGKNRYNNVLPYDISRVKLSVQTHSTDDYINANYMPGYHSKKDFIATQGPLPNTLKDFWRMVWEKNVYAIIMLTKCVEQGRTKCEEYWPSKQAQDYGDITVAMTSEIVLPEWTIRDFTVKNIQTSESHPLRQFHFTSWPDHGVPDTTDLLINFRYLVRDYMKQSPPESPILVHCSAGVGRTGTFIAIDRLIYQIENENTVDVYGIVYDLRMHRPLMVQTEDQYVFLNQCVLDIVRSQKDSKVDLIYQNTTAMTIYENLAPVTTFGKTNGYIA

SEQ ID NO: 207387 - protein, 912 aa, Artificial Sequence
  Description of Artificial Sequence: Synthetic Chimeric Antigen Receptor
SLPVTALLLPLALLLHAARPDIQMTQTTSSLSASLGDRVTISCRASQDISKYLNWYQQKPDGTVKLLIYHTSRLHSGVPSRFSGSGSGTDYSLTISNLEQEDIATYFCQQGNTLPYTFGGGTKLEITKAGGGGSGGGGSGGGGSGGGGSEVKLQESGPGLVAPSQSLSVTCTVSGVSLPDYGVSWIRQPPRKGLEWLGVIWGSETTYYNSALKSRLTIIKDNSKSQVFLKMNSLQTDDTAIYYCAKHYYYGGSYAMDYWGQGTSVTVSSDPTTTPAPRPPTPAPTIASQPLSLRPEACRPAAGGAVHTRGLDFACDIFVWLVWGGVLACYSLLVTVAFIIFWVRRVKFSRSADAPAYQQGQNQLYNELNLGRREEYDVLDKRRGRDPEMGGKPRRKNPQEGLYNELQKDKMAEAYSEIGMKGERRRGKGHDGLYQGLSTATKDTYDALHMQALPPRRAEGRGSLLTCGDVEENPGPMAVPTQVLGLLLLWLTDARCDIQMTQSPSSLSASVGDRVTITCRASEDIYFNLVWYQQKPGKAPKLLIYDTNRLADGVPSRFSGSGSGTQYTLTISSLQPEDFATYYCQHYKNYPLTFGQGTKLEIKRSGGGGSGGGGSGGGGSGGGGSRSEVQLVESGGGLVQPGGSLRLSCAASGFTLSNYGMHWIRQAPGKGLEWVSSISLNGGSTYYRDSVKGRFTISRDNAKSTLYLQNSLRAEDTAVYYCAAQDAYTGGYFDYWGQGTLVTVSSMDPATTTKPVLRTPSPVHPTGTSQPQRPEDCRPRGSVKGTGLDFACDILIGVSWFLFCLLLLVLFCLHRQNQIKQGPPRSKDEEQKPQQRPDLAVDVLERTADKANGLPEKDRETDTSALAAGSSQEVTYAQLDHWALTQRTARAVSPQSTKPMAESITYAAVARH

SEQ ID NO: 207388 - protein, 1112 aa, Artificial Sequence
  Description of Artificial Sequence: Synthetic Chimeric Antigen Receptor
MSLPVTALLLPLALLLHAARPDIQMTQTTSSLSASLGDRVTISCRASQDISKYLNWYQQKPDGTVKLLIYHTSRLHSGVPSRFSGSGSGTDYSLTISNLEQEDIATYFCQQGNTLPYTFGGGTKLEITKAGGGGSGGGGSGGGGSGGGGSEVKLQESGPGLVAPSQSLSVTCTVSGVSLPDYGVSWIRQPPRKGLEWLGVIWGSETTYYNSALKSRLTIIKDNSKSQVFLKMNSLQTDDTAIYYCAKHYYYGGSYAMDYWGQGTSVTVSSDPTTTPAPRPPTPAPTIASQPLSLRPEACRPAAGGAVHTRGLDFACDIFVWLWVGGVLACYSLLVTVAFIIFVWRRVKFSRSADAPAYQQGQNQLYNELNLGRREEYDVLDKRRGRDPEGGKPRRKNPQEGLYNELQKDKMAEAYSEIGKGERRRGKGHDGLYQGLSTATKDTYDALHMQALPPRRAEGRGSLLTCGDVEENPGPMAVPTQVLGLLLLWLTDARCDIQMTQSPSSLSASVGDRVTITCRASEDIYFNLNAAYQQKPGKAPKLLIYDTNRLADGVPSRFSGSGSGTQYTLTISSLQPEDFATYYCQHYKNYPLTFGQGTKLEIKRSGGGGSGGGGSGGGGSGGGGSRSEVQLVESGGGLVQPGGSLRLSCAASGFTLSNYGMHWIRQAPGKGLEWVSSISLNGGSTYYRDSVKGRFTISRDNAKSTLYLQMNSLRAEDTAVYYCAAQDAYTGGYFDYWGQGTLVTVSSMDPATTTKPVLRTPSPVHPTGTSQPQRPEDCRPRGSVKGTGLDFACDIYWAPLAGICVALLLSLIITLICYHRSRKRVCKSGGGSFWEEFESLQKQEVKNLHQRLEGQRPENKGKNRYKNILPFDHSRVILQGRDSNIPGSDYINANYIKNQLLGPDENAKTYIASQGCLEATVNDFWQMAWQENSRVIVMTTREVEKGRNKCVPYWPEVGMQRAYGPYSVTNCGEHDTTEYKLRTLQVSPLDNGDLIREIWHYQYLSWPDHGVPSEPGGVLSFLDQINQRQESLPHAGPIIVHCSAGIGRTGTIIVIDMLMENISTKGLDCDIDIQKTIQMVRAQRSGMVQTEAQYKFIYVAIAQFIETTKKKL

SEQ ID NO: 207389 - protein, 1363 aa, Artificial Sequence
  Description of Artificial Sequence: Synthetic Chimeric Antigen Receptor
MSLPVTALLLPLALLLHAARPDIQMTQTTSSLSASLGDRVTISCRASQDISKYLNWYQQKPDGTVKLLIYHTSRLHSGVPSRFSGSGSGTDYSLTISNLEQEDIATYFCQQGNTLPYTFGGGTKLEITKAGGGGSGGGGSGGGGSGGGGSEVKLQESGPGLVAPSQSLSVTCTVSGVSLPDYGVSWIRQPPRKGLEWLGVIWGSETTYYNSALKSRLTIIKDNSKSQVFLKMNSLQTDDTAIYYCAKHYYYGGSYAMDYWGQGTSVTVSSDPTTTPAPRPPTPAPTIASQPLSLRPEACRPAAGGAVHTRGLDFACDIFWVLVVVGGVLACYSLLVTVAFIIFWVRRVKFSRSADAPAYQQGQNQLYNELNLGRREEYDVLDKRRGRDPEMGGKPRRKNPQEGLYNELQKDKMAEAYSEIGMKGERRRGKGHDGLYQGLSTATKDTYDALHMQALPPRRAEGRGSLLTCGDVEENPGPMAVPTQVLGLLLLWLTDARCDIQMTQSPSSLSASVGDRVTITCRASEDIYFNLVWYQQKPGKAPKLLIYDTNRLADGVPSRFSGSGSGTQYTLTISSLQPEDFATYYCQHYKNYPLTFGQGTKLEIKRSGGGGSGGGGSGGGGSGGGGSRSEVQLVESGGGLVQPGGSLRLSCAASGFTLSNYGMHWIRQAPGKGLEWVSSISLNGGSTYYRDSVKGRFTISRDNAKSTLYLQMNSLRAEDTAVYYCAAQDAYTGGYFDYWGQGTLVTVSSMDPATTTKPVLRTPSPVHPTGTSQPQRPEDCRPRGSVKGTGLDFACDILIGVSVVFLFCLLLLVLFCLHRQNQIKQGPPRSKDEEQKPQQRPDLAVDVLERTADKATVNGLPEKDRETDTSALAAGSSQEVTYAQLDHWALTQRTARAVSPQSTKPMAESITYAAVARHRAEGRGSLLTCGDVEENPGPWYHGHMSGGQAETLLQAKGEPWTFLVRESLSQPGDFVLSVLSDQPKAGPGSPLRVTHIKVMCEGGRYTVGGLETFDSLTDLVEHFKKTGIEEASGAFVYLRQPYSGGGGSFEAYFKKQQADSNCGFAEEYEDLKLVGISQPKYAAELAENRGKNRYNNVLPYDISRVKLSVQTHSTDDYINANYMPGYHSKKDFIATQGPLPNTLKDFWRMVWEKNVYAIIMLTKCVEQGRTKCEEYWPSKQAQDYGDITVAMTSEIVLPEWTIRDFTVKNIQTSESHPLRQFHFTSWPDHGVPDTTDLLINFRYLVRDYMKQSPPESPILVHCSAGVGRTGTFIAIDRLIYQIENENTVDVYGIVYDLRMHRPLMVQTEDQYVFLNQCVLDIVRSQKDSKVDLIYQNTTAMTIYENLAPVTTFGKTNGYIASGS

SEQ ID NO: 207390 - protein, 489 aa, Artificial Sequence
  Description of Artificial Sequence: Synthetic Chimeric Antigen Receptor
MALPVTALLLPLALLLHAARPQVTLKESGPGILKPSQTLSLTCSFSGFSLSTSGMGVGWIRQPSGKGLEWLAHIWWDDDKYYNPSLKSQLTISKDTSRNQVFLKITSVDTADTATYYCSRRPRGTMDAMDYWGQGTSVTVSSGGGGSGGGGSGGGGSDIVMTQAASSLSASLGDRVTISCRASQDISKYLNWYQQKPDGTVKLLIYYTSRLHSGVPSRFSGSGSGTDYSLTIRNLEQEDIATYFCQQVYTLPWTFGGGTKLEIKSGTTTPAPRPPTPAPTIASQPLSLRPEACRPAAGGAVHTRGLDFACDIYIWAPLAGTCGVLLLSLVITLYCKRGRKKLLYIFKQPFMRPVQTTQEEDGCSCRFPEEEEGGCELRVKFSRSADAPAYKQGQNQLYNELNLGRREEYDVLDKRRGRDPEMGGKPRRKNPQEGLYNELQKDKMAEAYSEIGMKGERRRGKGHDGLYQGLSTATKDTYDALHMQALPPR

SEQ ID NO: 207391 - protein, 455 aa, Artificial Sequence
  Description of Artificial Sequence: Synthetic Chimeric Antigen Receptor
MALPVTALLLPLALLLHAARPQIQLVQSGPELKKPGETVKISCKASGYTFTNFGMNWVKQGPGEGLKWMGWINTNTGEPRYAEEFKGRFAFSLETTASTAYLQINNLKNEDTATYFCARDWDGAYFFDYWGQGTTLTVSSGGGSGGGGSGGGGSSIVMTQTPKFLLVSAGDRVTITCKASQSVSNDVAWYQQKPGQSPKLLINFATNRYTGVPNRFTGSGYGTDFTFTISTVQAEDLALYFCQQDYSSPWTFGGGTKLEIKGLAVSTISSFFPPGYQIYIWAPLAGTCGVLLLSLVITLYCKRGRKKLLYIFKQPFMRPVQTTQEEDGCSCRFPEEEEGGCELRVKFSRSADAPAYQQGQNQLYNELNLGRREEYDVLDKRRGRDPEMGGKPRRKNPQEGLYNELQKDKMAEAYSEIGMKGERRRGKGHDGLYQGLSTATKDTYDALHMQALPPR

SEQ ID NO: 207392 - protein, 455 aa, Artificial Sequence
  Description of Artificial Sequence: Synthetic Chimeric Antigen Receptor
MALPVTALLLPLALLLHAARPQVQLQQSRPELVKPGASVKMSCKASGYTFTDYVISWVKQRTGQGLEWIGEIYPGSNSIYYNEKFKGRATLTADKSSSTAYMQLSSLTSEDSAVYFCAMGGNYGFDYWGQGTTLTVSSGGGGSGGGGSGGGGSQIVLTQSPAIMSASLGERVTLTCTASSSVNSNYLHWYQQKPGSSPKLWIYSTSNLASGVPARFSGSGSGTSYSLTISSMEAEDAATYYCHQYHRSPLTFGAGTKLELKGLAVSTISSFFPPGYQIYIWAPLAGTCGVLLLSLVITLYCKRGRKKLLYIFKQPFMRPVQTTQEEDGCSCRFPEEEEGGCELRVKFSRSADAPAYQQGQNQLYNELNLGRREEYDVLDKRRGRDPEMGGKPRRKNPQEGLYNELQKDKMAEAYSEIGMKGERRRGKGHDGLYQGLSTATKDTYDALHMQALPPR

SEQ ID NO: 207393 - protein, 458 aa, Artificial Sequence
  Description of Artificial Sequence: Synthetic Chimeric Antigen Receptor
MALPVTALLLPLALLLHAARPQIQLVQSGPELKKPGETVKISCKASGYTFTNFGMNWVKQGPGEGLKWMGWINTNTGEPRYAEEFKGRFAFSLETTASTAYLQINNLKNEDTATYFCARDWDGAYFFDYWGQGTTLTVSSGGGSGGGGSGGGGSSIVMTQTPKFLLVSAGDRVTITCKASQSVSNDVAWYQQKPGQSPKLLINFATNRYTGVPNRFTGSGYGTDFTFTISTVQAEDLALYFCQQDYSSPWTFGGGTKLEIKGLAVSTISSFFPPGYQIISFFLALTSTALLFLLFFLTLRFSVVKRGRKKLLYIFKQPFMRPVQTTQEEDGCSCRFPEEEEGGCELRVKFSRSADAPAYQQGQNQLYNELNLGRREEYDVLDKRRGRDPEMGGKPRRKNPQEGLYNELQKDKMAEAYSEIGMKGERRRGKGHDGLYQGLSTATKDTYDALHMQALPPR

SEQ ID NO: 207394 - protein, 458 aa, Artificial Sequence
  Description of Artificial Sequence: Synthetic Chimeric Antigen Receptor
MALPVTALLLPLALLLHAARPQVQLQQSRPELVKPGASVKMSCKASGYTFTDYVISWVKQRTGQGLEWIGEIYPGSNSIYYNEKFKGRATLTADKSSSTAYMQLSSLTSEDSAVYFCAMGGNYGFDYWGQGTTLTVSSGGGGSGGGGSGGGGSQIVLTQSPAIMSASLGERVTLTCTASSSVNSNYLHWYQQKPGSSPKLWIYSTSNLASGVPARFSGSGSGTSYSLTISSMEAEDAATYYCHQYHRSPLTFGAGTKLELKGLAVSTISSFFPPGYQIISFFLALTSTALLFLLFFLTLRFSVVKRGRKKLLYIFKQPFMRPVQTTQEEDGCSCRFPEEEEGGCELRVKFSRSADAPAYQQGQNQLYNELNLGRREEYDVLDKRRGRDPEMGGKPRRKNPQEGLYNELQKDKMAEAYSEIGMKGERRRGKGHDGLYQGLSTATKDTYDALHMQALPPR

SEQ ID NO: 207395 - protein, 459 aa, Artificial Sequence
  Description of Artificial Sequence: Synthetic Chimeric Antigen Receptor
MALPVTALLLPLALLLHAARPEVQLVESGGGLVQPKGSLKLSCAASGFTFNTYAMNWVRQAPGKGLEWVARIRSKSNNYATYYADSVKDRFTISRDDSQSMLYLQMNNLKTEDTAMYYCVRQWDYDVRAMNYWGQGTSVTVSSGGGGSGGGGSGGGGSDIVMTQSHIFMSTSVGDRVSITCKASQDVDTAVAWYQQKPGQSPKLLIYWASTRLTGVPDRFTGSGSGTDFTLTISNVQSEDLADYFCQQYSSYPYTFGGGTKLEIKGLAVSTISSFFPPGYQIYIWAPLAGTCGVLLLSLVITLYCKRGRKKLLYIFKQPFMRPVQTTQEEDGCSCRFPEEEEGGCELRVKFSRSADAPAYQQGQNQLYNELNLGRREEYDVLDKRRGRDPEMGGKPRRKNPQEGLYNELQKDKMAEAYSEIGMKGERRRGKGHDGLYQGLSTATKDTYDALHMQALPPR

SEQ ID NO: 207396 - protein, 461 aa, Artificial Sequence
  Description of Artificial Sequence: Synthetic Chimeric Antigen Receptor
MALPVTALLLPLALLLHAARPEVQLQQSGPDLVKPGASVKISCKASGYSFTGYYMHWVKQSHGKSLEWIGRINPNNGVTLYNQKFKDKAILTVDKSSTTAYMELRSLTSEDSAVYYCARSTMITNYVMDYWGQVTSVTVSSGGGGSGGGGSGGGGSSIVMTQTPTFLLVSAGDRVTITCKASQSVSNDVAWYQQKPGQSPTLLISYTSSRYAGVPDRFIGSGYGTDFTFTISTLQAEDLAVYFCQQDYNSPPTFGGGTKLEIKRGLAVSTISSFFPPGYQIISFFLALTSTALLFLLFFLTLRFSVVKRGRKKLLYIFKQPFMRPVQTTQEEDGCSCRFPEEEEGGCELRVKFSRSADAPAYQQGQNQLYNELNLGRREEYDVLDKRRGRDPEMGGKPRRKNPQEGLYNELQKDKMAEAYSEIGMKGERRRGKGHDGLYQGLSTATKDTYDALHMQALPPR

SEQ ID NO: 207397 - protein, 462 aa, Artificial Sequence
  Description of Artificial Sequence: Synthetic Chimeric Antigen Receptor
MALPVTALLLPLALLLHAARPEVQLVESGGGLVQPKGSLKLSCAASGFTFNTYAMNWVRQAPGKGLEWVARIRSKSNNYATYYADSVKDRFTISRDDSQSMLYLQMNNLKTEDTAMYYCVRQWDYDVRAMNYWGQGTSVTVSSGGGGSGGGGSGGGGSDIVMTQSHIFMSTSVGDRVSITCKASQDVDTAVAWYQQKPGQSPKLLIYWASTRLTGVPDRFTGSGSGTDFTLTISNVQSEDLADYFCQQYSSYPYTFGGGTKLEIKGLAVSTISSFFPPGYQIISFFLALTSTALLFLLFFLTLRFSVVKRGRKKLLYIFKQPFMRPVQTTQEEDGCSCRFPEEEEGGCELRVKFSRSADAPAYQQGQNQLYNELNLGRREEYDVLDKRRGRDPEMGGKPRRKNPQEGLYNELQKDKMAEAYSEIGMKGERRRGKGHDGLYQGLSTATKDTYDALHMQALPPR

SEQ ID NO: 207398 - protein, 484 aa, Artificial Sequence
  Description of Artificial Sequence: Synthetic Chimeric Antigen Receptor
MALPVTALLLPLALLLHAARPQIQLVQSGPELKKPGETVKISCKASGYTFTNFGMNWVKQGPGEGLKWMGWINTNTGEPRYAEEFKGRFAFSLETTASTAYLQINNLKNEDTATYFCARDWDGAYFFDYWGQGTTLTVSSGGGSGGGGSGGGGSSIVMTQTPKFLLVSAGDRVTITCKASQSVSNDVAWYQQKPGQSPKLLINFATNRYTGVPNRFTGSGYGTDFTFTISTVQAEDLALYFCQQDYSSPWTFGGGTKLEIKTTTPAPRPPTPAPTIASQPLSLRPEACRPAAGGAVHTRGLDFACDIYIWAPLAGTCGVLLLSLVITLYCKRGRKKLLYIFKQPFMRPVQTTQEEDGCSCRFPEEEEGGCELRVKFSRSADAPAYQQGQNQLYNELNLGRREEYDVLDKRRGRDPEMGGKPRRKNPQEGLYNELQKDKMAEAYSEIGMKGERRRGKGHDGLYQGLSTATKDTYDALHMQALPPR

SEQ ID NO: 207399 - protein, 484 aa, Artificial Sequence
  Description of Artificial Sequence: Synthetic Chimeric Antigen Receptor
MALPVTALLLPLALLLHAARPQVQLQQSRPELVKPGASVKMSCKASGYTFTDYVISWVKQRTGQGLEWIGEIYPGSNSIYYNEKFKGRATLTADKSSSTAYMQLSSLTSEDSAVYFCAMGGNYGFDYWGQGTTLTVSSGGGGSGGGGSGGGGSQIVLTQSPAIMSASLGERVTLTCTASSSVNSNYLHWYQQKPGSSPKLWIYSTSNLASGVPARFSGSGSGTSYSLTISSMEAEDAATYYCHQYHRSPLTFGAGTKLELKTTTPAPRPPTPAPTIASQPLSLRPEACRPAAGGAVHTRGLDFACDIYIWAPLAGTCGVLLLSLVITLYCKRGRKKLLYIFKQPFMRPVQTTQEEDGCSCRFPEEEEGGCELRVKFSRSADAPAYQQGQNQLYNELNLGRREEYDVLDKRRGRDPEMGGKPRRKNPQEGLYNELQKDKMAEAYSEIGMKGERRRGKGHDGLYQGLSTATKDTYDALHMQALPPR

SEQ ID NO: 207400 - protein, 487 aa, Artificial Sequence
  Description of Artificial Sequence: Synthetic Chimeric Antigen Receptor
MALPVTALLLPLALLLHAARPEVQLQQSGPDLVKPGASVKISCKASGYSFTGYYMHWVKQSHGKSLEWIGRINPNNGVTLYNQKFKDKAILTVDKSSTTAYMELRSLTSEDSAVYYCARSTMITNYVMDYWGQVTSVTVSSGGGGSGGGGSGGGGSSIVMTQTPTFLLVSAGDRVTITCKASQSVSNDVAWYQQKPGQSPTLLISYTSSRYAGVPDRFIGSGYGTDFTFTISTLQAEDLAVYFCQQDYNSPPTFGGGTKLEIKRTTTPAPRPPTPAPTIASQPLSLRPEACRPAAGGAVHTRGLDFACDIYIWAPLAGTCGVLLLSLVITLYCKRGRKKLLYIFKQPFMRPVQTTQEEDGCSCRFPEEEEGGCELRVKFSRSADAPAYQQGQNQLYNELNLGRREEYDVLDKRRGRDPEMGGKPRRKNPQEGLYNELQKDKMAEAYSEIGMKGERRRGKGHDGLYQGLSTATKDTYDALHMQALPPR

SEQ ID NO: 207401 - protein, 487 aa, Artificial Sequence
  Description of Artificial Sequence: Synthetic Chimeric Antigen Receptor
MALPVTALLLPLALLLHAARPQIQLVQSGPELKKPGETVKISCKASGYTFTNFGMNWVKQGPGEGLKWMGWINTNTGEPRYAEEFKGRFAFSLETTASTAYLQINNLKNEDTATYFCARDWDGAYFFDYWGQGTTLTVSSGGGSGGGGSGGGGSSIVMTQTPKFLLVSAGDRVTITCKASQSVSNDVAWYQQKPGQSPKLLINFATNRYTGVPNRFTGSGYGTDFTFTISTVQAEDLALYFCQQDYSSPWTFGGGTKLEIKTTTPAPRPPTPAPTIASQPLSLRPEACRPAAGGAVHTRGLDFACDIISFFLALTSTALLFLLFFLTLRFSVVKRGRKKLLYIFKQPFMRPVQTTQEEDGCSCRFPEEEEGGCELRVKFSRSADAPAYQQGQNQLYNELNLGRREEYDVLDKRRGRDPEMGGKPRRKNPQEGLYNELQKDKMAEAYSEIGMKGERRRGKGHDGLYQGLSTATKDTYDALHMQALPPR

SEQ ID NO: 207402 - protein, 487 aa, Artificial Sequence
  Description of Artificial Sequence: Synthetic Chimeric Antigen Receptor
MALPVTALLLPLALLLHAARPQVQLQQSRPELVKPGASVKMSCKASGYTFTDYVISWVKQRTGQGLEWIGEIYPGSNSIYYNEKFKGRATLTADKSSSTAYMQLSSLTSEDSAVYFCAMGGNYGFDYWGQGTTLTVSSGGGGSGGGGSGGGGSQIVLTQSPAIMSASLGERVTLTCTASSSVNSNYLHWYQQKPGSSPKLWIYSTSNLASGVPARFSGSGSGTSYSLTISSMEAEDAATYYCHQYHRSPLTFGAGTKLELKTTTPAPRPPTPAPTIASQPLSLRPEACRPAAGGAVHTRGLDFACDIISFFLALTSTALLFLLFFLTLRFSVVKRGRKKLLYIFKQPFMRPVQTTQEEDGCSCRFPEEEEGGCELRVKFSRSADAPAYQQGQNQLYNELNLGRREEYDVLDKRRGRDPEMGGKPRRKNPQEGLYNELQKDKMAEAYSEIGMKGERRRGKGHDGLYQGLSTATKDTYDALHMQALPPR

SEQ ID NO: 207403 - protein, 488 aa, Artificial Sequence
  Description of Artificial Sequence: Synthetic Chimeric Antigen Receptor
MALPVTALLLPLALLLHAARPEVQLVESGGGLVQPKGSLKLSCAASGFTFNTYAMNWVRQAPGKGLEWVARIRSKSNNYATYYADSVKDRFTISRDDSQSMLYLQMNNLKTEDTAMYYCVRQWDYDVRAMNYWGQGTSVTVSSGGGGSGGGGSGGGGSDIVMTQSHIFMSTSVGDRVSITCKASQDVDTAVAWYQQKPGQSPKLLIYWASTRLTGVPDRFTGSGSGTDFTLTISNVQSEDLADYFCQQYSSYPYTFGGGTKLEIKTTTPAPRPPTPAPTIASQPLSLRPEACRPAAGGAVHTRGLDFACDIYIWAPLAGTCGVLLLSLVITLYCKRGRKKLLYIFKQPFMRPVQTTQEEDGCSCRFPEEEEGGCELRVKFSRSADAPAYQQGQNQLYNELNLGRREEYDVLDKRRGRDPEMGGKPRRKNPQEGLYNELQKDKMAEAYSEIGMKGERRRGKGHDGLYQGLSTATKDTYDALHMQALPPR

SEQ ID NO: 207404 - protein, 490 aa, Artificial Sequence
  Description of Artificial Sequence: Synthetic Chimeric Antigen Receptor
MALPVTALLLPLALLLHAARPEVQLQQSGPDLVKPGASVKISCKASGYSFTGYYMHWVKQSHGKSLEWIGRINPNNGVTLYNQKFKDKAILTVDKSSTTAYMELRSLTSEDSAVYYCARSTMITNYVMDYWGQVTSVTVSSGGGGSGGGGSGGGGSSIVMTQTPTFLLVSAGDRVTITCKASQSVSNDVAWYQQKPGQSPTLLISYTSSRYAGVPDRFIGSGYGTDFTFTISTLQAEDLAVYFCQQDYNSPPTFGGGTKLEIKRTTTPAPRPPTPAPTIASQPLSLRPEACRPAAGGAVHTRGLDFACDIISFFLALTSTALLFLLFFLTLRFSVVKRGRKKLLYIFKQPFMRPVQTTQEEDGCSCRFPEEEEGGCELRVKFSRSADAPAYQQGQNQLYNELNLGRREEYDVLDKRRGRDPEMGGKPRRKNPQEGLYNELQKDKMAEAYSEIGMKGERRRGKGHDGLYQGLSTATKDTYDALHMQALPPR

SEQ ID NO: 207405 - protein, 491 aa, Artificial Sequence
  Description of Artificial Sequence: Synthetic Chimeric Antigen Receptor
MALPVTALLLPLALLLHAARPEVQLVESGGGLVQPKGSLKLSCAASGFTFNTYAMNWVRQAPGKGLEWVARIRSKSNNYATYYADSVKDRFTISRDDSQSMLYLQMNNLKTEDTAMYYCVRQWDYDVRAMNYWGQGTSVTVSSGGGGSGGGGSGGGGSDIVMTQSHIFMSTSVGDRVSITCKASQDVDTAVAWYQQKPGQSPKLLIYWASTRLTGVPDRFTGSGSGTDFTLTISNVQSEDLADYFCQQYSSYPYTFGGGTKLEIKTTTPAPRPPTPAPTIASQPLSLRPEACRPAAGGAVHTRGLDFACDIISFFLALTSTALLFLLFFLTLRFSVVKRGRKKLLYIFKQPFMRPVQTTQEEDGCSCRFPEEEEGGCELRVKFSRSADAPAYQQGQNQLYNELNLGRREEYDVLDKRRGRDPEMGGKPRRKNPQEGLYNELQKDKMAEAYSEIGMKGERRRGKGHDGLYQGLSTATKDTYDALHMQALPPR

SEQ ID NO: 207406 - protein, 670 aa, Artificial Sequence
  Description of Artificial Sequence: Synthetic Chimeric Antigen Receptor
MALPVTALLLPLALLLHAARPQIQLVQSGPELKKPGETVKISCKASGYTFTNFGMNWVKQGPGEGLKWMGWINTNTGEPRYAEEFKGRFAFSLETTASTAYLQINNLKNEDTATYFCARDWDGAYFFDYWGQGTTLTVSSGGGSGGGGSGGGGSSIVMTQTPKFLLVSAGDRVTITCKASQSVSNDVAWYQQKPGQSPKLLINFATNRYTGVPNRFTGSGYGTDFTFTISTVQAEDLALYFCQQDYSSPWTFGGGTKLEIKEPKSPDKTHTCPPCPAPPVAGPSVFLFPPKPKDTLMIARTPEVTCVVVDVSHEDPEVKFNWYVDGVEVHNAKTKPREEQYNSTYRVVSVLTVLHQDWLNGKEYKCKVSNKALPAPIEKTISKAKGQPREPQVYTLPPSRDELTKNQVSLTCLVKGFYPSDIAVEWESNGQPENNYKTTPPVLDSDGSFFLYSKLTVDKSRWQQGNVFSCSVMHEALHNHYTQKSLSLSPGKIYIWAPLAGTCGVLLLSLVITLYCKRGRKKLLYIFKQPFMRPVQTTQEEDGCSCRFPEEEEGGCELRVKFSRSADAPAYQQGQNQLYNELNLGRREEYDVLDKRRGRDPEMGGKPRRKNPQEGLYNELQKDKMAEAYSEIGMKGERRRGKGHDGLYQGLSTATKDTYDALHMQALPPR

SEQ ID NO: 207407 - protein, 670 aa, Artificial Sequence
  Description of Artificial Sequence: Synthetic Chimeric Antigen Receptor
MALPVTALLLPLALLLHAARPQVQLQQSRPELVKPGASVKMSCKASGYTFTDYVISWVKQRTGQGLEWIGEIYPGSNSIYYNEKFKGRATLTADKSSSTAYMQLSSLTSEDSAVYFCAMGGNYGFDYWGQGTTLTVSSGGGGSGGGGSGGGGSQIVLTQSPAIMSASLGERVTLTCTASSSVNSNYLHWYQQKPGSSPKLWIYSTSNLASGVPARFSGSGSGTSYSLTISSMEAEDAATYYCHQYHRSPLTFGAGTKLELKEPKSPDKTHTCPPCPAPPVAGPSVFLFPPKPKDTLMIARTPEVTCVVVDVSHEDPEVKFNWYVDGVEVHNAKTKPREEQYNSTYRVVSVLTVLHQDWLNGKEYKCKVSNKALPAPIEKTISKAKGQPREPQVYTLPPSRDELTKNQVSLTCLVKGFYPSDIAVEWESNGQPENNYKTTPPVLDSDGSFFLYSKLTVDKSRWQQGNVFSCSVMHEALHNHYTQKSLSLSPGKIYIWAPLAGTCGVLLLSLVITLYCKRGRKKLLYIFKQPFMRPVQTTQEEDGCSCRFPEEEEGGCELRVKFSRSADAPAYQQGQNQLYNELNLGRREEYDVLDKRRGRDPEMGGKPRRKNPQEGLYNELQKDKMAEAYSEIGMKGERRRGKGHDGLYQGLSTATKDTYDALHMQALPPR

SEQ ID NO: 207408 - protein, 673 aa, Artificial Sequence
  Description of Artificial Sequence: Synthetic Chimeric Antigen Receptor
MALPVTALLLPLALLLHAARPQIQLVQSGPELKKPGETVKISCKASGYTFTNFGMNWVKQGPGEGLKWMGWINTNTGEPRYAEEFKGRFAFSLETTASTAYLQINNLKNEDTATYFCARDWDGAYFFDYWGQGTTLTVSSGGGSGGGGSGGGGSSIVMTQTPKFLLVSAGDRVTITCKASQSVSNDVAWYQQKPGQSPKLLINFATNRYTGVPNRFTGSGYGTDFTFTISTVQAEDLALYFCQQDYSSPWTFGGGTKLEIKEPKSPDKTHTCPPCPAPPVAGPSVFLFPPKPKDTLMIARTPEVTCVVVDVSHEDPEVKFNWYVDGVEVHNAKTKPREEQYNSTYRVVSVLTVLHQDWLNGKEYKCKVSNKALPAPIEKTISKAKGQPREPQVYTLPPSRDELTKNQVSLTCLVKGFYPSDIAVEWESNGQPENNYKTTPPVLDSDGSFFLYSKLTVDKSRWQQGNVFSCSVMHEALHNHYTQKSLSLSPGKIISFFLALTSTALLFLLFFLTLRFSVVKRGRKKLLYIFKQPFMRPVQTTQEEDGCSCRFPEEEEGGCELRVKFSRSADAPAYQQGQNQLYNELNLGRREEYDVLDKRRGRDPEMGGKPRRKNPQEGLYNELQKDKMAEAYSEIGMKGERRRGKGHDGLYQGLSTATKDTYDALHMQALPPR

SEQ ID NO: 207409 - protein, 673 aa, Artificial Sequence
  Description of Artificial Sequence: Synthetic Chimeric Antigen Receptor
MALPVTALLLPLALLLHAARPQVQLQQSRPELVKPGASVKMSCKASGYTFTDYVISWVKQRTGQGLEWIGEIYPGSNSIYYNEKFKGRATLTADKSSSTAYMQLSSLTSEDSAVYFCAMGGNYGFDYWGQGTTLTVSSGGGGSGGGGSGGGGSQIVLTQSPAIMSASLGERVTLTCTASSSVNSNYLHWYQQKPGSSPKLWIYSTSNLASGVPARFSGSGSGTSYSLTISSMEAEDAATYYCHQYHRSPLTFGAGTKLELKEPKSPDKTHTCPPCPAPPVAGPSVFLFPPKPKDTLMIARTPEVTCVVVDVSHEDPEVKFNWYVDGVEVHNAKTKPREEQYNSTYRVVSVLTVLHQDWLNGKEYKCKVSNKALPAPIEKTISKAKGQPREPQVYTLPPSRDELTKNQVSLTCLVKGFYPSDIAVEWESNGQPENNYKTTPPVLDSDGSFFLYSKLTVDKSRWQQGNVFSCSVMHEALHNHYTQKSLSLSPGKIISFFLALTSTALLFLLFFLTLRFSVVKRGRKKLLYIFKQPFMRPVQTTQEEDGCSCRFPEEEEGGCELRVKFSRSADAPAYQQGQNQLYNELNLGRREEYDVLDKRRGRDPEMGGKPRRKNPQEGLYNELQKDKMAEAYSEIGMKGERRRGKGHDGLYQGLSTATKDTYDALHMQALPPR

SEQ ID NO: 207410 - protein, 674 aa, Artificial Sequence
  Description of Artificial Sequence: Synthetic Chimeric Antigen Receptor
MALPVTALLLPLALLLHAARPEVQLVESGGGLVQPKGSLKLSCAASGFTFNTYAMNWVRQAPGKGLEWVARIRSKSNNYATYYADSVKDRFTISRDDSQSMLYLQMNNLKTEDTAMYYCVRQWDYDVRAMNYWGQGTSVTVSSGGGGSGGGGSGGGGSDIVMTQSHIFMSTSVGDRVSITCKASQDVDTAVAWYQQKPGQSPKLLIYWASTRLTGVPDRFTGSGSGTDFTLTISNVQSEDLADYFCQQYSSYPYTFGGGTKLEIKEPKSPDKTHTCPPCPAPPVAGPSVFLFPPKPKDTLMIARTPEVTCVVVDVSHEDPEVKFNWYVDGVEVHNAKTKPREEQYNSTYRVVSVLTVLHQDWLNGKEYKCKVSNKALPAPIEKTISKAKGQPREPQVYTLPPSRDELTKNQVSLTCLVKGFYPSDIAVEWESNGQPENNYKTTPPVLDSDGSFFLYSKLTVDKSRWQQGNVFSCSVMHEALHNHYTQKSLSLSPGKIYIWAPLAGTCGVLLLSLVITLYCKRGRKKLLYIFKQPFMRPVQTTQEEDGCSCRFPEEEEGGCELRVKFSRSADAPAYQQGQNQLYNELNLGRREEYDVLDKRRGRDPEMGGKPRRKNPQEGLYNELQKDKMAEAYSEIGMKGERRRGKGHDGLYQGLSTATKDTYDALHMQALPPR

SEQ ID NO: 207411 - protein, 676 aa, Artificial Sequence
  Description of Artificial Sequence: Synthetic Chimeric Antigen Receptor
MALPVTALLLPLALLLHAARPEVQLQQSGPDLVKPGASVKISCKASGYSFTGYYMHWVKQSHGKSLEWIGRINPNNGVTLYNQKFKDKAILTVDKSSTTAYMELRSLTSEDSAVYYCARSTMITNYVMDYWGQVTSVTVSSGGGGSGGGGSGGGGSSIVMTQTPTFLLVSAGDRVTITCKASQSVSNDVAWYQQKPGQSPTLLISYTSSRYAGVPDRFIGSGYGTDFTFTISTLQAEDLAVYFCQQDYNSPPTFGGGTKLEIKREPKSPDKTHTCPPCPAPPVAGPSVFLFPPKPKDTLMIARTPEVTCVVVDVSHEDPEVKFNWYVDGVEVHNAKTKPREEQYNSTYRVVSVLTVLHQDWLNGKEYKCKVSNKALPAPIEKTISKAKGQPREPQVYTLPPSRDELTKNQVSLTCLVKGFYPSDIAVEWESNGQPENNYKTTPPVLDSDGSFFLYSKLTVDKSRWQQGNVFSCSVMHEALHNHYTQKSLSLSPGKIISFFLALTSTALLFLLFFLTLRFSVVKRGRKKLLYIFKQPFMRPVQTTQEEDGCSCRFPEEEEGGCELRVKFSRSADAPAYQQGQNQLYNELNLGRREEYDVLDKRRGRDPEMGGKPRRKNPQEGLYNELQKDKMAEAYSEIGMKGERRRGKGHDGLYQGLSTATKDTYDALHMQALPPR

SEQ ID NO: 207412 - protein, 677 aa, Artificial Sequence
  Description of Artificial Sequence: Synthetic Chimeric Antigen Receptor
MALPVTALLLPLALLLHAARPEVQLVESGGGLVQPKGSLKLSCAASGFTFNTYAMNWVRQAPGKGLEWVARIRSKSNNYATYYADSVKDRFTISRDDSQSMLYLQMNNLKTEDTAMYYCVRQWDYDVRAMNYWGQGTSVTVSSGGGGSGGGGSGGGGSDIVMTQSHIFMSTSVGDRVSITCKASQDVDTAVAWYQQKPGQSPKLLIYWASTRLTGVPDRFTGSGSGTDFTLTISNVQSEDLADYFCQQYSSYPYTFGGGTKLEIKEPKSPDKTHTCPPCPAPPVAGPSVFLFPPKPKDTLMIARTPEVTCVVVDVSHEDPEVKFNWYVDGVEVHNAKTKPREEQYNSTYRVVSVLTVLHQDWLNGKEYKCKVSNKALPAPIEKTISKAKGQPREPQVYTLPPSRDELTKNQVSLTCLVKGFYPSDIAVEWESNGQPENNYKTTPPVLDSDGSFFLYSKLTVDKSRWQQGNVFSCSVMHEALHNHYTQKSLSLSPGKIISFFLALTSTALLFLLFFLTLRFSVVKRGRKKLLYIFKQPFMRPVQTTQEEDGCSCRFPEEEEGGCELRVKFSRSADAPAYQQGQNQLYNELNLGRREEYDVLDKRRGRDPEMGGKPRRKNPQEGLYNELQKDKMAEAYSEIGMKGERRRGKGHDGLYQGLSTATKDTYDALHMQALPPR

SEQ ID NO: 207413 - protein, 468 aa, Artificial Sequence
  Description of Artificial Sequence: Synthetic Chimeric Antigen Receptor
QVTLKESGPGILKPSQTLSLTCSFSGFSLSTSGMGVGWIRQPSGKGLEWLAHIWWDDDKYYNPSLKSQLTISKDTSRNQVFLKITSVDTADTATYYCSRRPRGTMDAMDYWGQGTSVTVSSGGGGSGGGGSGGGGSDIVMTQAASSLSASLGDRVTISCRASQDISKYLNWYQQKPDGTVKLLIYYTSRLHSGVPSRFSGSGSGTDYSLTIRNLEQEDIATYFCQQVYTLPWTFGGGTKLEIKSGTTTPAPRPPTPAPTIASQPLSLRPEACRPAAGGAVHTRGLDFACDIYIWAPLAGTCGVLLLSLVITLYCKRGRKKLLYIFKQPFMRPVQTTQEEDGCSCRFPEEEEGGCELRVKFSRSADAPAYKQGQNQLYNELNLGRREEYDVLDKRRGRDPEMGGKPRRKNPQEGLYNELQKDKMAEAYSEIGMKGERRRGKGHDGLYQGLSTATKDTYDALHMQALPPR

SEQ ID NO: 207414 - protein, 470 aa, Artificial Sequence
  Description of Artificial Sequence: Synthetic Chimeric Antigen Receptor
QVTLKESGPGILKPSQTLSLTCSFSGFSLNTSGMGVGWIRQPSGKGLEWLAHIWWDDDKYYNPSLKSQLTISKDTSRNQVFLKITSVDTADSATYYCARRASHVSTVDSFDFWGQGTTLTVSSGGGGSGGGGSGGGGSDIQMTQTTSSLSASLGDRVTISCRASQDISNYLNWFQQKPDGTVKLLIYYTSRLHSGVPSKFSGSGSGTDYSLTISNLEQEDIATYFCQQGYTLPWTFGGGTKLEIKSGTTTPAPRPPTPAPTIASQPLSLRPEACRPAAGGAVHTRGLDFACDIYIWAPLAGTCGVLLLSLVITLYCKRGRKKLLYIFKQPFMRPVQTTQEEDGCSCRFPEEEEGGCELRVKFSRSADAPAYKQGQNQLYNELNLGRREEYDVLDKRRGRDPEMGGKPRRKNPQEGLYNELQKDKMAEAYSEIGMKGERRRGKGHDGLYQGLSTATKDTYDALHMQALPPR

SEQ ID NO: 207415 - protein, 491 aa, Artificial Sequence
  Description of Artificial Sequence: Synthetic Chimeric Antigen Receptor
MALPVTALLLPLALLLHAARPQVTLKESGPGILKPSQTLSLTCSFSGFSLNTSGMGVGWIRQPSGKGLEWLAHIWWDDDKYYNPSLKSQLTISKDTSRNQVFLKITSVDTADSATYYCARRASHVSTVDSFDFWGQGTTLTVSSGGGGSGGGGSGGGGSDIQMTQTTSSLSASLGDRVTISCRASQDISNYLNWFQQKPDGTVKLLIYYTSRLHSGVPSKFSGSGSGTDYSLTISNLEQEDIATYFCQQGYTLPWTFGGGTKLEIKSGTTTPAPRPPTPAPTIASQPLSLRPEACRPAAGGAVHTRGLDFACDIYIWAPLAGTCGVLLLSLVITLYCKRGRKKLLYIFKQPFMRPVQTTQEEDGCSCRFPEEEEGGCELRVKFSRSADAPAYKQGQNQLYNELNLGRREEYDVLDKRRGRDPEMGGKPRRKNPQEGLYNELQKDKMAEAYSEIGMKGERRRGKGHDGLYQGLSTATKDTYDALHMQALPPR

SEQ ID NO: 207416 - protein, 546 aa, Artificial Sequence
  Description of Artificial Sequence: Synthetic Chimeric Antigen Receptor
MDFQVQIFSFLLISASVIMSRGDIQMTQSPSSVSASIGDRVTITCRASQGIDNWLGWYQQKPGKAPKLLIYDASNLDTGVPSRFSGSGSGTYFTLTISSLQAEDFAVYFCQQAKAFPPTFGGGTKVDIKGSTSGSGKPGSGEGSEVQLVQSGGGLVKPGGSLRLSCAASGFTFSSYSMNWVRQAPGKGLEWVSSISSSSSYIYYADSVKGRFTISRDNAKNSLYLQMNSLRAEDTAVYYCARVTDAFDIWGQGTMVTVSSAAAFVPVFLPAKPTTTPAPRPPTPAPTIASQPLSLRPEACRPAAGGAVHTRGLDFACDIYIWAPLAGTCGVLLLSLVITLYCNHRNRSKRSRLLHSDYMNMTPRRPGPTRKHYQPYAPPRDFAAYRSRFSVVKRGRKKLLYIFKQPFMRPVQTTQEEDGCSCRFPEEEEGGCELRVKFSRSADAPAYQQGQNQLYNELNLGRREEYDVLDKRRGRDPEMGGKPRRKNPQEGLYNELQKDKMAEAYSEIGMKGERRRGKGHDGLYQGLSTATKDTYDALHMQALPPR

SEQ ID NO: 207417 - protein, 709 aa, Artificial Sequence
  Description of Artificial Sequence: Synthetic Chimeric Antigen Receptor
QVTLKESGPGILKPSQTLSLTCSFSGFSLSTSGMGVGWIRQPSGKGLEWLAHIWWDDDKYYNPSLKSQLTISKDTSRNQVFLKITSVDTADTATYYCSRRPRGTMDAMDYWGQGTSVTVSSGGGGSGGGGSGGGGSDIVMTQAASSLSASLGDRVTISCRASQDISKYLNWYQQKPDGTVKLLIYYTSRLHSGVPSRFSGSGSGTDYSLTIRNLEQEDIATYFCQQVYTLPWTFGGGTKLEIKLEDPAEPKSPDKTHTCPPCPAPELLGGPSVFLFPPKPKDTLMISRTPEVTCVVVDVSHEDPEVKFNWYVDGVEVHNAKTKPREEQYNSTYRVVSVLTVLHQDWLNGKEYKCKVSNKALPAPIEKTISKAKGQPREPQVYTLPPSRDELTKNQVSLTCLVKGFYPSDIAVEWESNGQPENNYKTTPPVLDSDGSFFLYSKLTVDKSRWQQGNVFSCSVMHEALHNHYTQKSLSLSPGKKDPKSGTTTPAPRPPTPAPTIASQPLSLRPEACRPAAGGAVHTRGLDFACDIYIWAPLAGTCGVLLLSLVITLYCKRGRKKLLYIFKQPFMRPVQTTQEEDGCSCRFPEEEEGGCELRVKFSRSADAPAYKQGQNQLYNELNLGRREEYDVLDKRRGRDPEMGGKPRRKNPQEGLYNELQKDKMAEAYSEIGMKGERRRGKGHDGLYQGLSTATKDTYDALHMQALPPR

SEQ ID NO: 207418 - protein, 711 aa, Artificial Sequence
  Description of Artificial Sequence: Synthetic Chimeric Antigen Receptor
QVTLKESGPGILKPSQTLSLTCSFSGFSLNTSGMGVGWIRQPSGKGLEWLAHIWWDDDKYYNPSLKSQLTISKDTSRNQVFLKITSVDTADSATYYCARRASHVSTVDSFDFWGQGTTLTVSSGGGGSGGGGSGGGGSDIQMTQTTSSLSASLGDRVTISCRASQDISNYLNWFQQKPDGTVKLLIYYTSRLHSGVPSKFSGSGSGTDYSLTISNLEQEDIATYFCQQGYTLPWTFGGGTKLEIKLEDPAEPKSPDKTHTCPPCPAPELLGGPSVFLFPPKPKDTLMISRTPEVTCVVVDVSHEDPEVKFNWYVDGVEVHNAKTKPREEQYNSTYRVVSVLTVLHQDWLNGKEYKCKVSNKALPAPIEKTISKAKGQPREPQVYTLPPSRDELTKNQVSLTCLVKGFYPSDIAVEWESNGQPENNYKTTPPVLDSDGSFFLYSKLTVDKSRWQQGNVFSCSVMHEALHNHYTQKSLSLSPGKKDPKSGTTTPAPRPPTPAPTIASQPLSLRPEACRPAAGGAVHTRGLDFACDIYIWAPLAGTCGVLLLSLVITLYCKRGRKKLLYIFKQPFMRPVQTTQEEDGCSCRFPEEEEGGCELRVKFSRSADAPAYKQGQNQLYNELNLGRREEYDVLDKRRGRDPEMGGKPRRKNPQEGLYNELQKDKMAEAYSEIGMKGERRRGKGHDGLYQGLSTATKDTYDALHMQALPPR

SEQ ID NO: 207419 - protein, 730 aa, Artificial Sequence
  Description of Artificial Sequence: Synthetic Chimeric Antigen Receptor
MALPVTALLLPLALLLHAARPQVTLKESGPGILKPSQTLSLTCSFSGFSLSTSGMGVGWIRQPSGKGLEWLAHIWWDDDKYYNPSLKSQLTISKDTSRNQVFLKITSVDTADTATYYCSRRPRGTMDAMDYWGQGTSVTVSSGGGGSGGGGSGGGGSDIVMTQAASSLSASLGDRVTISCRASQDISKYLNWYQQKPDGTVKLLIYYTSRLHSGVPSRFSGSGSGTDYSLTIRNLEQEDIATYFCQQVYTLPWTFGGGTKLEIKLEDPAEPKSPDKTHTCPPCPAPELLGGPSVFLFPPKPKDTLMISRTPEVTCVVVDVSHEDPEVKFNWYVDGVEVHNAKTKPREEQYNSTYRVVSVLTVLHQDWLNGKEYKCKVSNKALPAPIEKTISKAKGQPREPQVYTLPPSRDELTKNQVSLTCLVKGFYPSDIAVEWESNGQPENNYKTTPPVLDSDGSFFLYSKLTVDKSRWQQGNVFSCSVMHEALHNHYTQKSLSLSPGKKDPKSGTTTPAPRPPTPAPTIASQPLSLRPEACRPAAGGAVHTRGLDFACDIYIWAPLAGTCGVLLLSLVITLYCKRGRKKLLYIFKQPFMRPVQTTQEEDGCSCRFPEEEEGGCELRVKFSRSADAPAYKQGQNQLYNELNLGRREEYDVLDKRRGRDPEMGGKPRRKNPQEGLYNELQKDKMAEAYSEIGMKGERRRGKGHDGLYQGLSTATKDTYDALHMQALPPR

SEQ ID NO: 207420 - protein, 732 aa, Artificial Sequence
  Description of Artificial Sequence: Synthetic Chimeric Antigen Receptor
MALPVTALLLPLALLLHAARPQVTLKESGPGILKPSQTLSLTCSFSGFSLNTSGMGVGWIRQPSGKGLEWLAHIWWDDDKYYNPSLKSQLTISKDTSRNQVFLKITSVDTADSATYYCARRASHVSTVDSFDFWGQGTTLTVSSGGGGSGGGGSGGGGSDIQMTQTTSSLSASLGDRVTISCRASQDISNYLNWFQQKPDGTVKLLIYYTSRLHSGVPSKFSGSGSGTDYSLTISNLEQEDIATYFCQQGYTLPWTFGGGTKLEIKLEDPAEPKSPDKTHTCPPCPAPELLGGPSVFLFPPKPKDTLMISRTPEVTCVVVDVSHEDPEVKFNWYVDGVEVHNAKTKPREEQYNSTYRVVSVLTVLHQDWLNGKEYKCKVSNKALPAPIEKTISKAKGQPREPQVYTLPPSRDELTKNQVSLTCLVKGFYPSDIAVEWESNGQPENNYKTTPPVLDSDGSFFLYSKLTVDKSRWQQGNVFSCSVMHEALHNHYTQKSLSLSPGKKDPKSGTTTPAPRPPTPAPTIASQPLSLRPEACRPAAGGAVHTRGLDFACDIYIWAPLAGTCGVLLLSLVITLYCKRGRKKLLYIFKQPFMRPVQTTQEEDGCSCRFPEEEEGGCELRVKFSRSADAPAYKQGQNQLYNELNLGRREEYDVLDKRRGRDPEMGGKPRRKNPQEGLYNELQKDKMAEAYSEIGMKGERRRGKGHDGLYQGLSTATKDTYDALHMQALPPR

SEQ ID NO: 207421 - protein, 726 aa, Artificial Sequence
  Description of Artificial Sequence: Synthetic Chimeric Antigen Receptor
LLVTSLLLCELPHPAFLLIPDTDVKLQESGPGLVAPSQSLSITCTVSGFSLTSYAVSWVRQPPGKGLEWLGIIWSGGATNYNSALKSRLSISKDNSKSQVFLKMNGLQTDDTARYYCAREHYYGSSAMDYWGQGASITVSSGGGGSGGGGSGGGGSGIVMTQSPLSLPVSLGDQASISCRSSQSIVHSYGNTYLFWYLQKPGQSPKLLIYRVSNRFSGVPDRFSGSGSGTNFTLKISRVEAEDMGVYYCFQGTHVPYTFGGGTKLEIKEPKSCDKTHTCPPCPAPELLGGPSVFLFPPKPKDTLMISRTPEVTCVVVDVSHEDPEVKFNWYVDGVEVHNAKTKPREEQYNSTYRVVSVLTVLHQDWLNGKEYKCKVSNKALPAPIEKTISKAKGQPREPQVYTLPPSRDELTKNQVSLTCLVKGFYPSDIAVEWESNGQPENNYKTTPPVLDSDGSFFLYSKLTVDKSRWQQGNVFSCSVMHEALHNHYTQKSLSLSPGKKDPKAAAIEVMYPPPYLDNEKSNGTIIHVKGKHLCPSPLFPGPSKPFWVLVVVGGVLACYSLLVTVAFIIFWVRSKRSRLLHSDYMNMTPRRPGPTRKHYQPYAPPRDFAAYRSRVKFSRSADAPAYQQGQNQLYNELNLGRREEYDVLDKRRGRDPEMGGKPRRKNPQEGLYNELQKDKMAEAYSEIGMKGERRRGKGHDGLYQGLSTATKDTYDALHMQALPPR

SEQ ID NO: 207422 - protein, 481 aa, Artificial Sequence
  Description of Artificial Sequence: Synthetic Chimeric Antigen Receptor
MDFQVQIFSFLLISASVIMSRGDIQMTQSPSSVSASIGDRVTITCRASQGIDNWLGWYQQKPGKAPKLLIYDASNLDTGVPSRFSGSGSGTYFTLTISSLQAEDFAVYFCQQAKAFPPTFGGGTKVDIKGSTSGSGKPGSGEGSEVQLVQSGGGLVKPGGSLRLSCAASGFTFSSYSMNWVRQAPGKGLEWVSSISSSSSYIYYADSVKGRFTISRDNAKNSLYLQMNSLRAEDTAVYYCARVTDAFDIWGQGTMVTVSSAAAIEVMYPPPYLDNEKSNGTIIHVKGKHLCPSPLFPGPSKPFWVLVVVGGVLACYSLLVTVAFIIFWRSKRSRLLHSDYMNMTPRRPGPTRKHYQPYAPPRDFAAYRSRVKFSRSADAPAYQQGQNQLYNELNLGRREEYDVLDKRRGRDPEMGGKPRRKNPQEGLYNELQKDKMAEAYSEIGMKGERRRGKGHDGLYQGLSTATKDTYDALHMQALPPR

SEQ ID NO: 207423 - protein, 487 aa, Artificial Sequence
  Description of Artificial Sequence: Synthetic Chimeric Antigen Receptor
MGWSCIILFLVATATGVHSEVQLVETGGGLVQPGNSLKLSCATSGFIFSTTWMNWIRQTPGKRLEWLAQIEDKSNNYFISYSESVKGRFTISRDDSKSSVYLQMNNLKEEDTAIYYCSWKYRSNYYFDYWGQGVMVTVSSGSTSGSGKPGSGEGSDIVLTQSPALAVSLEQRATISCKTSQNVDYYGISYLHWYQQKPGQQPKLLIYEGSNLASGIPARFSGSGSGTDFTLTIDPVEADDIVTYYCQQSKDYPYTFGAGTKLELKAAAIEVMYPPPYLDNEKSNGTIIHVKGKHLCPSPLFPGPSKPFWVLVVVGGVLACYSLLVTVAFIIFWVRSKRSRLLHSDYMNMTPRRPGPTRKHYQPYAPPRDFAAYRSRVKFSRSADAPAYQQGQNQLYNELNLGRREEYDVLDKRRGRDPEMGGKPRRKNPQEGLYNELQKDKMAEAYSEIGMKGERRRGKGHDGLYQGLSTATKDTYDALHMQALPPR

SEQ ID NO: 207424 - protein, 494 aa, Artificial Sequence
  Description of Artificial Sequence: Synthetic Chimeric Antigen Receptor
MGWSCIILFLVATATGVHSEVQLVETGGGLVQPGNSLKLSCATSGFIFSTTWMNWIRQTPGKRLEWLAQIEDKSNNYFISYSESVKGRFTISRDDSKSSVYLQMNNLKEEDTAIYYCSWKYRSNYYFDYWGQGVMVTVSSGSTSGSGKPGSGEGSDIVLTQSPALAVSLEQRATISCKTSQNVDYYGISYLHWYQQKPGQQPKLLIYEGSNLASGIPARFSGSGSGTDFTLTIDPVEADDIVTYYCQQSKDYPYTFGAGTKLELKAAATTTKPVLRTPSPVHPTGTSQPQRPEDCRPRGSVKGTGLDFACDIYIWAPLAGICVALLLSLIITLICYHRSRNSRRNRLLQVTTMNMTPRRPGLTRKPYQPYAPARDFAAYRPRAKFSRSAETAANLQDPNQLYNELNLGRREEYDVLEKKRARDPEMGGKQQRRRNPQEGVYNALQKDKMAEAYSEIGTKGERRRGKGHDGLYQGLSTATKDTYDALHMQTLAPR

SEQ ID NO: 207425 - protein, 539 aa, Artificial Sequence
  Description of Artificial Sequence: Synthetic Chimeric Antigen Receptor
MGWSCIILFLVATATGVHSEVQLVETGGGLVQPGNSLKLSCATSGFIFSTTWMNWIRQTPGKRLEWLAQIEDKSNNYFISYSESVKGRFTISRDDSKSSVYLQMNNLKEEDTAIYYCSWKYRSNYYFDYWGQGVMVTVSSGSTSGSGKPGSGEGSDIVLTQSPALAVSLEQRATISCKTSQNVDYYGISYLHWYQQKPGQQPKLLIYEGSNLASGIPARFSGSGSGTDFTLTIDPVEADDIVTYYCQQSKDYPYTFGAGTKLELKAAATTTKPVLRTPSPVHPTGTSQPQRPEDCRPRGSVKGTGLDFACDIYIWAPLAGICVALLLSLIITLICYHRSRNSRRNRLLQVTTMNMTPRRPGLTRKPYQPYAPARDFAAYRPKWIRKKFPHIFKQPFKKTTGAAQEEDACSCRCPQEEEGGGGGYELRAKFSRSAETAANLQDPNQLYNELNLGRREEYDVLEKKRARDPEMGGKQQRRRNPQEGVYNALQKDKMAEAYSEIGTKGERRRGKGHDGLYQGLSTATKDTYDALHMQTLAPR

SEQ ID NO: 207426 - protein, 551 aa, Artificial Sequence
  Description of Artificial Sequence: Synthetic Chimeric Antigen Receptor
MGWSCIILFLVATATGVHSEVQLVETGGGLVQPGNSLKLSCATSGFIFSTTWMNWIRQTPGKRLEWLAQIEDKSNNYFISYSESVKGRFTISRDDSKSSVYLQMNNLKEEDTAIYYCSWKYRSNYYFDYWGQGVMVTVSSGSTSGSGKPGSGEGSDIVLTQSPALAVSLEQRATISCKTSQNVDYYGISYLHWYQQKPGQQPKLLIYEGSNLASGIPARFSGSGSGTDFTLTIDPVEADDIVTYYCQQSKDYPYTFGAGTKLELKAAAFVPVFLPAKPTTTPAPRPPTPAPTIASQPLSLRPEACRPAAGGAVHTRGLDFACDIYIWAPLAGTCGVLLLSLVITLYCNHRNRSKRSRLLHSDYMNMTPRRPGPTRKHYQPYAPPRDFAAYRSRFSVVKRGRKKLLYIFKQPFMRPVQTTQEEDGCSCRFPEEEEGGCELRVKFSRSADAPAYQQGQNQLYNELNLGRREEYDVLDKRRGRDPEMGGKPRRKNPQEGLYNELQKDKMAEAYSEIGMKGERRRGKGHDGLYQGLSTATKDTYDALHMQALPPR

SEQ ID NO: 207427 - protein, 708 aa, Artificial Sequence [sequence omitted]

SEQ ID NO: 207428 - protein, 33 aa, Homo sapiens
MGLHLRPYRVGLLPDGLLFLLLLLMLLADPALP

SEQ ID NO: 207429 - protein, 24 aa, Homo sapiens
MSAPKLLSLGCIFFPLLLFQQARA

SEQ ID NO: 207430 - protein, 26 aa, Homo sapiens
MCPRAARAPATLLLALGAVLWPAAGA

SEQ ID NO: 207431 - protein, 18 aa, Homo sapiens
MKLSLVAAMLLLLSAARA

SEQ ID NO: 207432 - protein, 20 aa, Homo sapiens
MEPWPLLLLFSLCSAGLVLG

SEQ ID NO: 207433 - protein, 23 aa, Homo sapiens
MTPGALLMLLGALGAPLAPGVRG

SEQ ID NO: 207434 - protein, 20 aa, Homo sapiens
MARAPLGVLLLLGLLGRGVG

SEQ ID NO: 207435 - protein, 19 aa, Homo sapiens
MVEMLPTAILLVLAVSVVA

SEQ ID NO: 207436 - protein, 16 aa, Homo sapiens
MFRLWLLLAGLCGLLA

SEQ ID NO: 207437 - protein, 28 aa, Homo sapiens
MECCRRATPGTLLLFLAFLLLSSRTARS

SEQ ID NO: 207438 - protein, 18 aa, Homo sapiens
MLLLGAVLLLLALPGHDQ

SEQ ID NO: 207439 - protein, 21 aa, Artificial Sequence
  Description of Artificial Sequence: Synthetic Signal Sequence
MKLVSVALMYLGSLAFLGADT

SEQ ID NO: 207440 - protein, 16 aa, Homo sapiens
MTTLLWVFVTLRVITA

SEQ ID NO: 207441 - protein, 17 aa, Homo sapiens
MISPFLVLAIGTCLTNS

SEQ ID NO: 207442 - protein, 18 aa, Homo sapiens
MALSWVLTVLSLLPLLEA

SEQ ID NO: 207443 - protein, 23 aa, Homo sapiens
MERMLPLLALGLLAAGFCPAVLC

SEQ ID NO: 207444 - protein, 24 aa, Homo sapiens
MPSSVSWGILLLAGLCCLVPVSLA

SEQ ID NO: 207445 - protein, 21 aa, Homo sapiens
MSMLVVFLLLWGVTWGPVTEA

SEQ ID NO: 207446 - protein, 27 aa, Homo sapiens
MALLWGLLVLSWSCLQGPCSVFSPVSA

SEQ ID NO: 207447 - protein, 18 aa, Artificial Sequence
  Description of Artificial Sequence: Synthetic Signal Sequence
MKSLVLLLCLAQLWGCHS

SEQ ID NO: 207448 - protein, 23 aa, Homo sapiens
MGKNKLLHPSLVLLLLVLLPTDA

SEQ ID NO: 207449 - protein, 15 aa, Homo sapiens
MKFFLLLFTIGFCWA

SEQ ID NO: 207450 - protein, 18 aa, Homo sapiens
MKWVESIFLIFLLNFTES

SEQ ID NO: 207451 - protein, 31 aa, Homo sapiens
MQLRNPELHLGCALALRFLALVSWDIPGARA

SEQ ID NO: 207452 - protein, 19 aa, Homo sapiens
MRFFVPLFLVGILFPAILA

SEQ ID NO: 207453 - protein, 17 aa, Homo sapiens
MLLKTVLLLGHVAQVLM

SEQ ID NO: 207454 - protein, 23 aa, Homo sapiens
MEAVAVAAAVGVLLLAGAGGAAG

SEQ ID NO: 207455 - protein, 15 aa, Homo sapiens
MRLLILTCLVAVALA

SEQ ID NO: 207456 - protein, 23 aa, Homo sapiens
MGTSHPAFLVLGCLLTGLSLILC

SEQ ID NO: 207457 - protein, 16 aa, Homo sapiens
MGTWILFACLLGAAFA

SEQ ID NO: 207458 - protein, 16 aa, Homo sapiens
MRSTILLFCLLGSTRS

SEQ ID NO: 207459 - protein, 19 aa, Homo sapiens
MPALGWAVAAILMLQTAMA

SEQ ID NO: 207460 - protein, 17 aa, Homo sapiens
MLPGLALLLLAAWTARA

SEQ ID NO: 207461 - protein, 24 aa, Homo sapiens
MVMGLGVLLLVFVLGLGLTPPTLA

SEQ ID NO: 207462 - protein, 22 aa, Homo sapiens
MDSLASLVLCGVSLLLSGTVEG

SEQ ID NO: 207463 - protein, 16 aa, Homo sapiens
MFTIKLLLFIVPLVIS

SEQ ID NO: 207464 - protein, 26 aa, Homo sapiens
MLKKPLSAVTWLCIFIVAFVSHPAWL

SEQ ID NO: 207465 - protein, 31 aa, Homo sapiens
MGQGWATAGLPSLLFLLLCYGHPLLVPSQEA

SEQ ID NO: 207466 - protein, 33 aa, Homo sapiens
MRKRAPQSEMAPAGVSLRATILCLLAWAGLAAG

SEQ ID NO: 207467 - protein, 20 aa, Homo sapiens
MEKIPVSAFLLLVALSYTLA

SEQ ID NO: 207468 - protein, 21 aa, Homo sapiens
MMLHSALGLCLLLVTVSSNLA

SEQ ID NO: 207469 - protein, 25 aa, Artificial Sequence
  Description of Artificial Sequence: Synthetic Signal Sequence
MKSSGLFPFLVLLALGTLAPWAVEG

SEQ ID NO: 207470 - protein, 32 aa, Artificial Sequence
  Description of Artificial Sequence: Synthetic polypeptide
MYSNVIGTVTSGKRKVYLLSLLLIGFWDCVTC

SEQ ID NO: 207471 - protein, 18 aa, Homo sapiens
MKAAVLTLAVLFLTGSQA

SEQ ID NO: 207472 - protein, 18 aa, Homo sapiens
MKLLAATVLLLTICSLEG

SEQ ID NO: 207473 - protein, 20 aa, Homo sapiens
MFLKAVVLTLALVAVAGARA

SEQ ID NO: 207474 - protein, 27 aa, Homo sapiens
MDPPRPALLALLALPALLLLLLAGARA

SEQ ID NO: 207475 - protein, 22 aa, Homo sapiens
MGTRLLPALFLVLLVLGFEVQG

SEQ ID NO: 207476 - protein, 20 aa, Homo sapiens
MQPRVLLVVALLALLASARA

SEQ ID NO: 207477 - protein, 26 aa, Homo sapiens
MRLFLSLPVLVVVLSIVLEGPAPAQG

SEQ ID NO: 207478 - protein, 20 aa, Homo sapiens
MVMLLLLLSALAGLFGAAEG

SEQ ID NO: 207479 - protein, 18 aa, Homo sapiens
MKVLWAALLVTFLAGCQA

SEQ ID NO: 207480 - protein, 22 aa, Homo sapiens
MFHQIWAALLYFYGIILNSIYQ

SEQ ID NO: 207481 - protein, 19 aa, Homo sapiens
MEHKEVVLLLLLFLKSAAP

SEQ ID NO: 207482 - protein, 30 aa, Homo sapiens
MAPHGPGSLTTLVPWAAALLLALGVERALA

SEQ ID NO: 207483 - protein, 23 aa, Homo sapiens
MPSPGTVCSLLLLGMLWLDLAMA

SEQ ID NO: 207484 - protein, 18 aa, Homo sapiens
MGAPRSLLLALAAGLAVA

SEQ ID NO: 207485 - protein, 25 aa, Homo sapiens
MSSFSTTTVSFLLLLAFQLLGQTRA

SEQ ID NO: 207486 - protein, 32 aa, Homo sapiens
MPGPRRPAGSRLRLLLLLLLPPLLLLLRGSHA

SEQ ID NO: 207487 - protein, 26 aa, Homo sapiens
MTRLTVLALLAGLLASSRAGSSPLLD

SEQ ID NO: 207488 - protein, 31 aa, Homo sapiens
MRENMARGPCNAPRWVSLMVLVAIGTAVTAA

SEQ ID NO: 207489 - protein, 20 aa, Homo sapiens
MAWASRLGLLLALLLPVVGA

SEQ ID NO: 207490 - protein, 16 aa, Homo sapiens
MLLILLSVALLALSSA

SEQ ID NO: 207491 - protein, 21 aa, Homo sapiens
MAAALFVLLGFALLGTHGASG

SEQ ID NO: 207492 - protein, 32 aa, Homo sapiens
MPGGPGVLQALPATIFLLFLLSAVYLGPGCQA

SEQ ID NO: 207493 - protein, 28 aa, Homo sapiens
MARLALSPVPSHWMVALLLLLSAEPVPA

SEQ ID NO: 207494 - protein, 31 aa, Homo sapiens
MSSWIRWHGPAMARLWGFCWLVVGFWRAAFA

SEQ ID NO: 207495 - protein, 19 aa, Homo sapiens
MISPVLILFSSFLCHVAIA

SEQ ID NO: 207496 - protein, 20 aa, Homo sapiens
MSRSVALAVLALLSLSGLEA

SEQ ID NO: 207497 - protein, 15 aa, Homo sapiens
MKVLILACLVALALA

SEQ ID NO: 207498 - protein, 22 aa, Artificial Sequence
  Description of Artificial Sequence: Synthetic peptide
MRIHYLLFALLFLFLVPVPGHG

SEQ ID NO: 207499 - protein, 20 aa, Homo sapiens
MGLFMIIAILLFQKPTVTEQ

SEQ ID NO: 207500 - protein, 23 aa, Homo sapiens
MPGFLVRILLLLLVLLLLGPTRG

SEQ ID NO: 207501 - protein, 22 aa, Homo sapiens
MARGSAVAWAALGPLLWGCALG

SEQ ID NO: 207502 - protein, 22 aa, Homo sapiens
MTSSRLWFSLLLAAAFAGRATA

SEQ ID NO: 207503 - protein, 20 aa, Homo sapiens
MNVLLGSVVIFATFVTLCNA

SEQ ID NO: 207504 - protein, 20 aa, Homo sapiens
MAWQGLVLAACLLMFPSTTA

SEQ ID NO: 207505 - protein, 32 aa, Homo sapiens
MRLPGAMPALALKGELLLLSLLLLLEPQISQG

SEQ ID NO: 207506 - protein, 20 aa, Homo sapiens
MDRHSSYIFIWLQLELCAMA

SEQ ID NO: 207507 - protein, 16 aa, Homo sapiens
MKLPLLLALLFGAVSA

SEQ ID NO: 207508 - protein, 16 aa, Homo sapiens
MKTALILLSILGMACA

SEQ ID NO: 207509 - protein, 30 aa, Homo sapiens
MLRGTMTAWRGMRPEVTLACLLLATAGCFA

SEQ ID NO: 207510 - protein, 29 aa, Artificial Sequence
  Description of Artificial Sequence: Synthetic Signal Sequence
MKMASSLAFLLLNFHVSLFLVQLLTPCSA

SEQ ID NO: 207511 - protein, 17 aa, Homo sapiens
MALMLSLVLSLLKLGSG

SEQ ID NO: 207512 - protein, 25 aa, Homo sapiens
MAGPAIHTAPMLFLVLLLPLELSLA

SEQ ID NO: 207513 - protein, 48 aa, Homo sapiens
MHPPKTPSGALHRKRKMAAWPFSRLWKVSDPILFQMTLIAALLPAVLG

SEQ ID NO: 207514 - protein, 17 aa, Homo sapiens
MFFWCACCLMVAWRVSA

SEQ ID NO: 207515 - protein, 22 aa, Homo sapiens
MEKKCTLYFLVLLPFFMILVTA

SEQ ID NO: 207516 - protein, 24 aa, Homo sapiens
MRFTFTSRCLALFLLLNHPTPILP

SEQ ID NO: 207517 - protein, 29 aa, Homo sapiens
MEAPGPRALRTALCGGCCCLLLCAQLAVA

SEQ ID NO: 207518 - protein, 28 aa, Homo sapiens
MLRRPAPALAPAARLLLAGLLCGGGVWA

SEQ ID NO: 207519 - protein, 19 aa, Homo sapiens
MDLRQFLMCLSLCTAFALS

SEQ ID NO: 207520 - protein, 18 aa, Homo sapiens
MRMLLALLALSAARPSAS

SEQ ID NO: 207521 - protein, 37 aa, Homo sapiens
MAPLCPSPWLPLLIPAPAPGLTVQLLLSLLLLVPVHP

SEQ ID NO: 207522 - protein, 26 aa, Homo sapiens
MRLHRLRARLSAVACGLLLLLVRGQG

SEQ ID NO: 207523 - protein, 16 aa, Homo sapiens
MRGLLVLSVLLGAVFG

SEQ ID NO: 207524 - protein, 15 aa, Homo sapiens
MLALLVLVTVALASA

SEQ ID NO: 207525 - protein, 17 aa, Homo sapiens
MDFPCLWLGLLLPLVAA

SEQ ID NO: 207526 - protein, 20 aa, Homo sapiens
MSDLLSVFLHLLLLFKLVAP

SEQ ID NO: 207527 - protein, 34 aa, Homo sapiens
MGHLSAPLHRVRVPWQGLLLTASLLTFWNPPTTA

SEQ ID NO: 207528 - protein, 34 aa, Homo sapiens
MGPPSAPPCRLHVPWKEVLLTASLLTFWNPPTTA

SEQ ID NO: 207529 - protein, 35 aa, Homo sapiens
MGSPSACPYRVCIPWQGLLLTASLLTFWNLPNSAQ

SEQ ID NO: 207530 - protein, 34 aa, Homo sapiens
MGPISAPSCRWRIPWQGLLLTASLFTFWNPPTTA

SEQ ID NO: 207531 - protein, 22 aa, Homo sapiens
MRVLSGTSLMLCSLLLLLQALC

SEQ ID NO: 207532 - protein, 18 aa, Homo sapiens
MQPSSLLPLALCLLAAPA

SEQ ID NO: 207533 - protein, 19 aa, Homo sapiens
MKTLLLLLLVLLELGEAQG

SEQ ID NO: 207534 - protein, 18 aa, Homo sapiens
MQPLLLLLAFLLPTGAEA

SEQ ID NO: 207535 - protein, 22 aa, Homo sapiens
MWATLPLLCAGAWLLGVPVCGA

SEQ ID NO: 207536 - protein, 21 aa, Homo sapiens
MALTAHPSCLLALLVAGLAQG

SEQ ID NO: 207537 - protein, 26 aa, Homo sapiens
MFPFYSCWRTGLLLLLLAVAVRESWQ

SEQ ID NO: 207538 - protein, 40 aa, Homo sapiens
MGAAAGRSPHLGPAPARRPQRSLLLLQLLLLVAAPGSTQA

SEQ ID NO: 207539 - protein, 23 aa, Homo sapiens
MQIITTALVCLLLAGMWPEDVDS

SEQ ID NO: 207540 - protein, 16 aa, Homo sapiens
MKVSAVLLCLLLMTAA

SEQ ID NO: 207541 - protein, 19 aa, Homo sapiens
MKISVAAIPFFLLITIALG

SEQ ID NO: 207542 - protein, 21 aa, Homo sapiens
MKVSVAALSCLMLVAVLGSQA

SEQ ID NO: 207543 - protein, 23 aa, Homo sapiens
MKVSEAALSLLVLILIITSASRS

SEQ ID NO: 207544 - protein, 23 aa, Homo sapiens
MAPLKMLALVTLLLGASLQHIHA

SEQ ID NO: 207545 - protein, 20 aa, Homo sapiens
MKGLAAALLVLVCTMALCSC

SEQ ID NO: 207546 - protein, 21 aa, Homo sapiens
MALLLALSLLVLWTSPAPTLS

SEQ ID NO: 207547 - protein, 23 aa, Homo sapiens
MKVSAALLCLLLIAATFIPQGLA

SEQ ID NO: 207548 - protein, 26 aa, Homo sapiens
MCCTKSLLLAALMSVLLLHLCGESEA

SEQ ID NO: 207549 - protein, 23 aa, Homo sapiens
MAQSLALSLLILVLAFGIPRTQG

SEQ ID NO: 207550 - protein, 24 aa, Homo sapiens
MARLQTALLVVLVLLAVALQATEA

SEQ ID NO: 207551 - protein, 21 aa, Homo sapiens
MKVSVAALSCLMLVTALGSQA

SEQ ID NO: 207552 - protein, 26 aa, Homo sapiens
MAGLMTIVTSLLFLGVCAHHIIPTGS

SEQ ID NO: 207553 - protein, 23 aa, Homo sapiens
MMGLSLASAVLLASLLSLHLGTA

SEQ ID NO: 207554 - protein, 24 aa, Homo sapiens
MKGPPTFCSLLLLSLLLSPDPTAA

SEQ ID NO: 207555 - protein, 23 aa, Homo sapiens
MQVSTAALAVLLCTMALCNQFSA

SEQ ID NO: 207556 - protein, 23 aa, Homo sapiens
MQVSTAALAVLLCTMALCNQVLS

SEQ ID NO: 207557 - protein, 23 aa, Homo sapiens
MKLCVTVLSLLMLVAAFCSPALS

SEQ ID NO: 207558 - protein, 23 aa, Homo sapiens
MKVSAAALAVILIATALCAPASA

SEQ ID NO: 207559 - protein, 23 aa, Homo sapiens
MKASAALLCLLLTAAAFSPQGLA

SEQ ID NO: 207560 - protein, 21 aa, Homo sapiens
MQGPPLLTAAHLLCVCTAALA

SEQ ID NO: 207561 - protein, 21 aa, Homo sapiens
MSAVLLLALLGFILPLPGVQA

SEQ ID NO: 207562 - protein, 23 aa, Homo sapiens
MAFDVSCFFWVVLFSAGCKVITS

SEQ ID NO: 207563 - protein, 18 aa, Homo sapiens
MDYPTLLLALLHVYRALC

SEQ ID NO: 207564 - protein, 19 aa, Homo sapiens
MARPHPWWLCVLGTLVGLS

SEQ ID NO: 207565 - protein, 28 aa, Homo sapiens
MLRRRGSPGMGVHVGAALGALWFCLTGA

SEQ ID NO: 207566 - protein, 35 aa, Homo sapiens
MSGGWMAQVGAWRTGALGLALLLLLGLGLGLEAAA

SEQ ID NO: 207567 - protein, 19 aa, Homo sapiens
MALLFSLILAICTRPGFLA

SEQ ID NO: 207568 - protein, 25 aa, Homo sapiens
MGIQGGSVLFGLLLVLAVFCHSGHS

SEQ ID NO: 207569 - protein, 19 aa, Homo sapiens
MSRGLQLLLLSCAYSLAPA

SEQ ID NO: 207570 - protein, 21 aa, Homo sapiens
MALPVTALLLPLALLLHAARP

SEQ ID NO: 207571 - DNA, 63 bp, Homo sapiens
atggccttaccagtgaccgccttgctcctgccgctggccttgctgctccacgccgccaggccg

SEQ ID NO: 207572 - DNA, 63 bp, Homo sapiens
atggcactgcctgtgaccgccctgctgctgccactggccctgctgctgcacgcagccaggccc

SEQ ID NO: 207573 - DNA, 63 bp, Homo sapiens
atggcactgccagtgacagccctgctgctgcctctggccctgctgctgcacgcagccagacct

SEQ ID NO: 207574 - DNA, 63 bp, Homo sapiens
atggcactgcctgtgacagccctgctgctgccactggccctgctgctgcacgcagcccgccct

SEQ ID NO: 207575 - DNA, 63 bp, Homo sapiens
atggcactgcctgtgaccgccctgctgctgccactggccctgctgctgcacgcagcccgccct

SEQ ID NO: 207576 - DNA, 63 bp, Homo sapiens
atggcactgcctgtgaccgccctgctgctgccactggccctgctgctgcacgcagccaggcct

SEQ ID NO: 207577 - DNA, 63 bp, Homo sapiens
atggcactgccagtgaccgccctgctgctgcctctggccctgctgctgcacgcagccagacca

SEQ ID NO: 207578 - DNA, 63 bp, Homo sapiens
atggcactgcctgtgaccgccctgctgctgccactggccctgctgctgcacgcagccaggcca

SEQ ID NO: 207579 - DNA, 63 bp, Homo sapiens
atggcactgcctgtgaccgccctgctgctgccactggccctgctgctgcacgcagccagaccc

SEQ ID NO: 207580 - DNA, 63 bp, Homo sapiens
atggccctgcctgtgacagccctgctgctgcctctggctctgctgctgcatgccgctagaccc

SEQ ID NO: 207581 - DNA, 63 bp, Homo sapiens
atggccctccctgtcaccgccctgctgcttccgctggctcttctgctccacgccgctcggccc

SEQ ID NO: 207582 - protein, 22 aa, Homo sapiens
MARGAALALLLFGLLGVLVAAP

SEQ ID NO: 207583 - protein, 24 aa, Homo sapiens
MGAPAASLLLLLLLFACCWAPGGA

SEQ ID NO: 207584 - protein, 21 aa, Homo sapiens
MVGKMWPVLWTLCAVRVTVDA

SEQ ID NO: 207585 - protein, 23 aa, Homo sapiens
MGLPRLVCAFLLAACCCCPRVAG

SEQ ID NO: 207586 - protein, 28 aa, Homo sapiens
MLCPWRTANLGLLLILTIFLVAASSSLC

SEQ ID NO: 207587 - protein, 17 aa, Homo sapiens
MHLLLFQLLVLLPLGKT

SEQ ID NO: 207588 - protein, 32 aa, Homo sapiens
MLGAKPHWLPGPLHSPGLPLVLVLLALGAGWA

SEQ ID NO: 207589 - protein, 27 aa, Homo sapiens
MGSGRRALSAVPAVLLVLTLPGLPVWA

SEQ ID NO: 207590 - protein, 19 aa, Homo sapiens
MKILILGIFLFLCSTPAWA

SEQ ID NO: 207591 - protein, 21 aa, Homo sapiens
MGVKASQTGFVVLVLLQCCSA

SEQ ID NO: 207592 - protein, 26 aa, Homo sapiens
MGATTMDQKSLWAGVVVLLLLQGGSA

SEQ ID NO: 207593 - protein, 21 aa, Homo sapiens
MVRSVAWAGFMVLLMIPWGSA

SEQ ID NO: 207594 - protein, 20 aa, Homo sapiens
MNSGVCLCVLMAVLAAGALT

SEQ ID NO: 207595 - protein, 17 aa, Homo sapiens
MLAATVLTLALLGNAHA

SEQ ID NO: 207596 - protein, 28 aa, Homo sapiens
MHSKVTIICIRFLFWFLLLCMLIGKSHT

SEQ ID NO: 207597 - protein, 25 aa, Homo sapiens
MVPEVRVLSSLLGLALLWFPLDSHA

SEQ ID NO: 207598 - protein, 20 aa, Homo sapiens
MEMFQGLLLLLLLSMGGTWA

SEQ ID NO: 207599 - protein, 26 aa, Homo sapiens
MAPGSRTSLLLAFALLCLPWLQEAGA

SEQ ID NO: 207600 - protein, 18 aa, Homo sapiens
MRSAAVLALLLCAGQVTA

SEQ ID NO: 207601 - protein, 19 aa, Homo sapiens
MLLLPLPLLLFLLCSRAEA

SEQ ID NO: 207602 - protein, 18 aa, Homo sapiens
MAFLWLLSCWALLGTTFG

SEQ ID NO: 207603 - protein, 22 aa, Homo sapiens
MMKTLLLFVGLLLTWESGQVLG

SEQ ID NO: 207604 - protein, 19 aa, Homo sapiens
MPLLTLYLLLFWLSGYSIA

SEQ ID NO: 207605 - protein, 18 aa, Homo sapiens
MRLLVLLWGCLLLPGYEA

SEQ ID NO: 207606 - protein, 28 aa, Homo sapiens
MFPGCPRLWVLVVLGTSWVGWGSQGTEA

SEQ ID NO: 207607 - protein, 19 aa, Homo sapiens
MQIELSTCFFLCLLRFCFS

SEQ ID NO: 207608 - protein, 18 aa, Homo sapiens
MIFLYQVVHFILFTSVSG

SEQ ID NO: 207609 - protein, 19 aa, Homo sapiens
MRALLLLGFLLVSLESTLS

SEQ ID NO: 207610 - protein, 20 aa, Homo sapiens
MRLKNLTFIIILIISGELYA

SEQ ID NO: 207611 - protein, 27 aa, Homo sapiens
MESSRVRLLPLLGAALLLMLPLLGTRA

SEQ ID NO: 207612 - protein, 17 aa, Homo sapiens
MEKILILLLVALSVAYA

SEQ ID NO: 207613 - protein, 21 aa, Homo sapiens
MAAALALVAGVLSGAVLPLWS

SEQ ID NO: 207614 - protein, 22 aa, Homo sapiens
MFSFVDLRLLLLLAATALLTHG

SEQ ID NO: 207615 - protein, 23 aa, Homo sapiens
MMSFVQKGSWLLLALLHPTIILA

SEQ ID NO: 207616 - protein, 27 aa, Homo sapiens
MGPRLSVWLLLLPAALLLHEEHSRAAA

SEQ ID NO: 207617 - protein, 23 aa, Homo sapiens
MKTCWKIPVFFFVCSFLEPWASA

SEQ ID NO: 207618 - protein, 19 aa, Homo sapiens
MRAARALLPLLLQACWTAA

SEQ ID NO: 207619 - protein, 21 aa, Homo sapiens
MWVSWAPGLWLLGLWATFGHG

SEQ ID NO: 207620 - protein, 25 aa, Homo sapiens
MGRDQRAVAGPALRRWLLLGTVTVG

SEQ ID NO: 207621 - protein, 26 aa, Homo sapiens
MMANWAEARPLLILIVLLGQFVSIKA

SEQ ID NO: 207622 - protein, 30 aa, Homo sapiens
MRPQGPAASPQRLRGLLLLLLLQLPAPSSA

SEQ ID NO: 207623 - protein, 22 aa, Homo sapiens
MEGPRGWLVLCVLAISLASMVT

SEQ ID NO: 207624 - protein, 25 aa, Homo sapiens
MKIPWGSIPVLMLLLLLGLIDISQA

SEQ ID NO: 207625 - protein, 28 aa, Homo sapiens
MDVGPSSLPHLGLKLLLLLLLLPLRGQA

SEQ ID NO: 207626 - protein, 15 aa, Homo sapiens
MRPLLVLLLLGLAAG

SEQ ID NO: 207627 - protein, 27 aa, Homo sapiens
MVTAALGPVWAALLLFLLMCEIPMVEL

SEQ ID NO: 207628 - protein, 17 aa, Homo sapiens
MWLLYLLVPALFCRAGG

SEQ ID NO: 207629 - protein, 15 aa, Homo sapiens
MWCIVLFSLLAWVYA

SEQ ID NO: 207630 - protein, 20 aa, Homo sapiens
MGPLMVLFCLLFLYPGLADS

SEQ ID NO: 207631 - protein, 22 aa, Homo sapiens
MGPTSGPSLLLLLLTHLPLALG

SEQ ID NO: 207632 - protein, 19 aa, Homo sapiens
MRLLWGLIWASSFFTLSLQ

SEQ ID NO: 207633 - protein, 21 aa, Homo sapiens
MATSMGLLLLLLLLLTQPGAG

SEQ ID NO: 207634 - protein, 21 aa, Homo sapiens
MARRSVLYFILLNALINKGQA

SEQ ID NO: 207635 - protein, 22 aa, Homo sapiens
MKVISLFILVGFIGEFQSFSSA

SEQ ID NO: 207636 - protein, 20 aa, Homo sapiens
MLPPGTATLLTLLLAAGSLG

SEQ ID NO: 207637 - protein, 21 aa, Homo sapiens
MSACRSFAVAICILEISILTA

SEQ ID NO: 207638 - protein, 34 aa, Homo sapiens
MTVARPSVPAALPLLGELPRLLLLVLLCLPAVWG

SEQ ID NO: 207639 - protein, 25 aa, Homo sapiens
MGSNLSPQLCLMPFILGLLSGGVTT

SEQ ID NO: 207640 - protein, 17 aa, Artificial Sequence
  Description of Artificial Sequence: Synthetic peptide
RLLAKIICLMLWAICVA

SEQ ID NO: 207641 - protein, 18 aa, Homo sapiens
MWLLVSVILISRISSVGG

SEQ ID NO: 207642 - protein, 18 aa, Homo sapiens
MKLLHVFLLFLCFHLRFC

SEQ ID NO: 207643 - protein, 41 aa, Homo sapiens
MGASSPRSPEPVGPPAPGLPFCCGGSLLAVVVLLALPVAWG

SEQ ID NO: 207644 - protein, 20 aa, Homo sapiens
MGAAGLLGVFLALVAPGVLG

SEQ ID NO: 207645 - protein, 20 aa, Artificial Sequence
  Description of Artificial Sequence: Synthetic Signal Sequence
MKMWLLVSHLVIISITTCLA

SEQ ID NO: 207646 - protein, 30 aa, Homo sapiens
MGTATRRKPHLLLVAAVALVSSSAWSSALG

SEQ ID NO: 207647 - protein, 22 aa, Homo sapiens
MPLLLYTCLLWLPTSGLWTVQA

SEQ ID NO: 207648 - protein, 26 aa, Homo sapiens
MPRSCCSRSGALLLALLLQASMEVRG

SEQ ID NO: 207649 - protein, 23 aa, Homo sapiens
MGGHPQLRLVKALLLLGLNPVSA

SEQ ID NO: 207650 - protein, 24 aa, Homo sapiens
MSPNFKLQCHFILIFLTALRGESR

SEQ ID NO: 207651 - protein, 18 aa, Homo sapiens
MEKLLCFLVLTSLSHAFG

SEQ ID NO: 207652 - protein, 21 aa, Homo sapiens
MRLSVCLLLLTLALCCYRANA

SEQ ID NO: 207653 - protein, 20 aa, Homo sapiens
MKLAALLGLCVALSCSSAAA

SEQ ID NO: 207654 - protein, 21 aa, Homo sapiens
MQAAWLLGALVVPQLLGFGHG

SEQ ID NO: 207655 - protein, 21 aa, Homo sapiens
MRPAFALCLLWQALWPGPGGG

SEQ ID NO: 207656 - protein, 29 aa, Homo sapiens
MAGLNCGVSIALLGVLLLGAARLPRGAEA

SEQ ID NO: 207657 - protein, 21 aa, Homo sapiens
MNQTAILICCLIFLTLSGIQG

SEQ ID NO: 207658 - protein, 21 aa, Artificial Sequence
  Description of Artificial Sequence: Synthetic Signal Sequence
MSVKGMAIALAVILCATVVQG

SEQ ID NO: 207659 - protein, 34 aa, Homo sapiens
MARATLSAAPSNPRLLRVALLLLLLVAASRRAAG

SEQ ID NO: 207660 - protein, 34 aa, Homo sapiens
MAHATLSAAPSNPRLLRVALLLLLLVAASRRAAG

SEQ ID NO: 207661 - protein, 36 aa, Homo sapiens
MSLLSSRAARVPGPSSSLCALLVLLLLLTQPGPIAS

SEQ ID NO: 207662 - protein, 37 aa, Homo sapiens
MSLPSSRAARVPGPSGSLCALLALLLLLTPPGPLASA

SEQ ID NO: 207663 - protein, 22 aa, Homo sapiens
MKKSGVLFLLGIILLVLIGVQG

SEQ ID NO: 207664 - protein, 28 aa, Homo sapiens
MSSPQRRKAMPWALSLLLMGFQLLVTYA

SEQ ID NO: 207665 - protein, 28 aa, Homo sapiens
MLGLPWKGGLSWALLLLLLGSQILLIYA

SEQ ID NO: 207666 - protein, 26 aa, Homo sapiens
MAGPLRAPLLLLAILAVALAVSPAAG

SEQ ID NO: 207667 - protein, 20 aa, Homo sapiens
MMWPMHTPLLLLTALMVAVA

SEQ ID NO: 207668 - protein, 20 aa, Homo sapiens
MARPLCTLLLLMATLAGALA

SEQ ID NO: 207669 - protein, 20 aa, Homo sapiens
MAWPLCTLLLLLATQAVALA

SEQ ID NO: 207670 - protein, 20 aa, Homo sapiens
MAQHLSTLLLLLATLAVALA

SEQ ID NO: 207671 - protein, 34 aa, Homo sapiens
MYLVAGDRGLAGCGHLLVSLLGLLLLLARSGTRA

SEQ ID NO: 207672 - protein, 21 aa, Homo sapiens
MEIKHLLFLVAAACLLPMLSM

SEQ ID NO: 207673 - protein, 24 aa, Homo sapiens
MRLPRRAALGLLPLLLLLPPAPEA

SEQ ID NO: 207674 - protein, 22 aa, Homo sapiens
MLKPSLPFTSLLFLQLPLLGVG

SEQ ID NO: 207675 - protein, 37 aa, Homo sapiens
MPAGRRGPAAQSARRPPPLLPLLLLLCVLGAPRAGSG

SEQ ID NO: 207676 - protein, 21 aa, Homo sapiens
MRLLILALLGICSLTAYIVEG

SEQ ID NO: 207677 - protein, 22 aa, Homo sapiens
MRTPGPLPVLLLLLAGAPAARP

SEQ ID NO: 207678 - protein, 23 aa, Homo sapiens
MTATEALLRVLLLLLAFGHSTYG

SEQ ID NO: 207679 - protein, 26 aa, Homo sapiens
MAAASRSASGWALLLLVALWQQRAAG

SEQ ID NO: 207680 - protein, 22 aa, Homo sapiens
MRGMKLLGALLALAALLQGAVS

SEQ ID NO: 207681 - protein, 19 aa, Homo sapiens
MRFMTLLFLTALAGALVCA

SEQ ID NO: 207682 - protein, 21 aa, Homo sapiens
MKFQGPLACLLLALCLGSGEA

SEQ ID NO: 207683 - protein, 31 aa, Homo sapiens
MMALGAAGATRVFVAMVAAALGGHPLLGVSA

SEQ ID NO: 207684 - protein, 21 aa, Homo sapiens
MQRLGATLLCLLLAAAVPTAP

SEQ ID NO: 207685 - protein, 18 aa, Homo sapiens
MVAAVLLGLSWLCSPLGA

SEQ ID NO: 207686 - protein, 16 aa, Homo sapiens
MWSGWWLWPLVAVCTA

SEQ ID NO: 207687 - protein, 24 aa, Homo sapiens
MGAGPSLLLAALLLLLSGDGAVRC

SEQ ID NO: 207688 - protein, 22 aa, Homo sapiens
MAPPGSSTVFLLALTIIASTWA

SEQ ID NO: 207689 - protein, 23 aa, Homo sapiens
MEAPAAGLFLLLLLGTWAPAPGS

SEQ ID NO: 207690 - protein, 25 aa, Homo sapiens
MASLFRSYLPAIWLLLSQLLRESLA

SEQ ID NO: 207691 - protein, 21 aa, Homo sapiens
MRGLAVLLTVALATLLAPGAG

SEQ ID NO: 207692 - protein, 25 aa, Homo sapiens
MGSRAELCTLLGGFSFLLLLIPGEG

SEQ ID NO: 207693 - protein, 22 aa, Homo sapiens
MRASSFLIVVVFLIAGTLVLEA

SEQ ID NO: 207694 - protein, 16 aa, Homo sapiens
MIRTLLLSTLVAGALS

SEQ ID NO: 207695 - protein, 25 aa, Homo sapiens
MDRGTLPLAVALLLASCSLSPTSLA

SEQ ID NO: 207696 - protein, 32 aa, Homo sapiens
MAAAVPRAAFLSPLLPLLLGFLLLSAPHGGSG

SEQ ID NO: 207697 - protein, 21 aa, Homo sapiens
MRALWVLGLCCVLLTFGSVRA

SEQ ID NO: 207698 - protein, 29 aa, Homo sapiens
MISLPGPLVTNLLRFLFLGLSALAPPSRA

SEQ ID NO: 207699 - protein, 17 aa, Homo sapiens
MDYLLMIFSLLFVACQG

SEQ ID NO: 207700 - protein, 27 aa, Homo sapiens
MVPKLFTSQICLLLLLGLMGVEGSLHA

SEQ ID NO: 207701 - protein, 23 aa, Homo sapiens
MKVSAALLWLLLIAAAFSPQGLA

SEQ ID NO: 207702 - protein, 20 aa, Homo sapiens
MDCQLSILLLLSCSVLDSFG

SEQ ID NO: 207703 - protein, 17 aa, Homo sapiens
MALDYLLLLLLASAVAA

SEQ ID NO: 207704 - protein, 16 aa, Homo sapiens
MVCSLWVLLLVSSVLA

SEQ ID NO: 207705 - protein, 18 aa, Homo sapiens
MEFLWAPLLGLCCSLAAA

SEQ ID NO: 207706 - protein, 25 aa, Homo sapiens
MRLLPLLRTVLWAAFLGSPLRGGSS

SEQ ID NO: 207707 - protein, 27 aa, Homo sapiens
MARPGQRWLGKWLVAMVVWALCRLATP

SEQ ID NO: 207708 - protein, 27 aa, Homo sapiens
MGPPHSGPGGVRVGALLLLGVLGLVSG

SEQ ID NO: 207709 - protein, 24 aa, Homo sapiens
MRPSGTAGAALLALLAALCPASRA

SEQ ID NO: 207710 - protein, 22 aa, Homo sapiens
MALGVPISVYLLFNAMTALTEE

SEQ ID NO: 207711 - protein, 23 aa, Homo sapiens
MGRGWGFLFGLLGAVWLLSSGHG

SEQ ID NO: 207712 - protein, 27 aa, Homo sapiens
MGVHECPAWLWLLLSLLSLPLGLPVLG

SEQ ID NO: 207713 - protein, 24 aa, Homo sapiens
MDHLGASLWPQVGSLCLLLAGAAW

SEQ ID NO: 207714 - protein, 21 aa, Homo sapiens
MIASQFLSALTLVLLIKESGA

SEQ ID NO: 207715 - protein, 18 aa, Homo sapiens
MLALLCSCLLLAAGASDA

SEQ ID NO: 207716 - protein, 27 aa, Homo sapiens
MKLGCVLMAWALYLSLGVLWVAQMLLA

SEQ ID NO: 207717 - protein, 16 aa, Homo sapiens
MLPRLLLLICAPLCEP

SEQ ID NO: 207718 - protein, 19 aa, Homo sapiens
MLLWSLLVIFDAVTEQADS

SEQ ID NO: 207719 - protein, 19 aa, Homo sapiens
MFSMRIVCLVLSVVGTAWT

SEQ ID NO: 207720 - protein, 30 aa, Homo sapiens
MKRMVSWSFHKLKTMKHLLLLLLCVFLVKS

SEQ ID NO: 207721 - protein, 26 aa, Artificial Sequence
  Description of Artificial Sequence: Synthetic Signal Sequence
MSWSLHPRNLILYFYALLFLSSTCVA

SEQ ID NO: 207722 - protein, 24 aa, Homo sapiens
MRSGCVVVHVWILAGLWLAVAGRP

SEQ ID NO: 207723 - protein, 28 aa, Homo sapiens
MDSDETGFEHSGLWVSVLAGLLLGACQA

SEQ ID NO: 207724 - protein, 24 aa, Homo sapiens
MLGARLRLWVCALCSVCSMSVLRA

SEQ ID NO: 207725 - protein, 22 aa, Homo sapiens
MGAPACALALCVAVAIVAGASS

SEQ ID NO: 207726 - protein, 21 aa, Homo sapiens
MRLLLALLGVLLSVPGPPVLS

SEQ ID NO: 207727 - protein, 24 aa, Homo sapiens
MTPSPLLLLLLPPLLLGAFPPAAA

SEQ ID NO: 207728 - protein, 31 aa, Homo sapiens
MLRGPGPGLLLLAVQCLGTAVPSTGASKSKR

SEQ ID NO: 207729 - protein, 29 aa, Homo sapiens
MERAAPSRRVPLPLLLLGGLALLAAGVDA

SEQ ID NO: 207730 - protein, 29 aa, Homo sapiens
MELSGATMARGLAVLLVLFLHIKNLPAQA

SEQ ID NO: 207731 - protein, 23 aa, Homo sapiens
MDLLWILPSLWLLLLGGPACLKT

SEQ ID NO: 207732 - protein, 19 aa, Homo sapiens
MRLFLWNAVLTLFVTSLIG

SEQ ID NO: 207733 - protein, 21 aa, Homo sapiens
MRLSWFRVLTVLSICLSAVAT

SEQ ID NO: 207734 - protein, 16 aa, Homo sapiens
MVWKWMPLLLLLVCVA

SEQ ID NO: 207735 - protein, 29 aa, Homo sapiens
MVRARHQPGGLCLLLLLLCQFMEDRSAQA

SEQ ID NO: 207736 - protein, 20 aa, Homo sapiens
MWKRWLALALALVAVAWVRA

SEQ ID NO: 207737 - protein, 26 aa, Homo sapiens
MRPGAPGPLWPLPWGALAWAVGFVSS

SEQ ID NO: 207738 - protein, 18 aa, Homo sapiens
MKTLQFFFLFCCWKAICC

SEQ ID NO: 207739 - protein, 24 aa, Homo sapiens
MAPISLSWLLRLATFCHLTVLLAG

SEQ ID NO: 207740 - protein, 22 aa, Homo sapiens
MAMTWIVFSLWPLTVFMGHIGG

SEQ ID NO: 207741 - protein, 26 aa, Artificial Sequence
  Description of Artificial Sequence: Synthetic Signal Sequence
MTAAAGSAGRAAVPLLLCALLAPGGA

SEQ ID NO: 207742 - protein, 18 aa, Homo sapiens
MTPPRLFWVWLLVAGTQG

SEQ ID NO: 207743 - protein, 19 aa, Homo sapiens
MWLLLTMASLISVLGTTHG

SEQ ID NO: 207744 - protein, 16 aa, Homo sapiens
MKWMVVVLVCLQLLEA

SEQ ID NO: 207745 - protein, 21 aa, Homo sapiens
MQRLCVYVLIFALALAAFSEA

SEQ ID NO: 207746 - protein, 23 aa, Homo sapiens
MRGSELPLVLLALVLCLAPRGRA

SEQ ID NO: 207747 - protein, 31 aa, Homo sapiens
MVRPLNPRPLPPVVLMLLLLLPPSPLPLAAG

SEQ ID NO: 207748 - protein, 27 aa, Homo sapiens
MAPHRPAPALLCALSLALCALSLPVRA

SEQ ID NO: 207749 - protein, 19 aa, Homo sapiens
MNWHLPLFLLASVTLPSIC

SEQ ID NO: 207750 - protein, 22 aa, Homo sapiens
MALKNKFSCLWILGLCLVATTS

SEQ ID NO: 207751 - protein, 20 aa, Homo sapiens
MKSIYFVAGLFVMLVQGSWQ

SEQ ID NO: 207752 - protein, 14 aa, Homo sapiens
MLLPLLLLLPMCWA

SEQ ID NO: 207753 - protein, 39 aa, Homo sapiens
MEFSSPSREECPKPLSRVSIMAGSLTGLLLLQAVSWASG

SEQ ID NO: 207754 - protein, 18 aa, Homo sapiens
MLCLLLTLGVALVCGVPA

SEQ ID NO: 207755 - protein, 19 aa, Homo sapiens
MYGKIIFVLLLSAIVSISA

SEQ ID NO: 207756 - protein, 19 aa, Homo sapiens
MYGKIIFVLLLSEIVSISA

SEQ ID NO: 207757 - protein, 19 aa, Homo sapiens
MYGKIIFVLLLSGIVSISA

SEQ ID NO: 207758 - protein, 24 aa, Homo sapiens
MDYYRKYAAIFLVTLSVFLHVLHS

SEQ ID NO: 207759 - protein, 23 aa, Homo sapiens
MELRARGWWLLCAAAALVACARG

SEQ ID NO: 207760 - protein, 21 aa, Homo sapiens
MAAAMPLALLVLLLLGPGGWC

SEQ ID NO: 207761 - protein, 27 aa, Homo sapiens
MAVTDSLSRAATVLATVLLLSFGSVAA

SEQ ID NO: 207762 - protein, 25 aa, Homo sapiens
MTPQSLLQTTLFLLSLLFLVQGAHG

SEQ ID NO: 207763 - protein, 24 aa, Homo sapiens
MARLGNCSLTWAALIILLLPGSLE

SEQ ID NO: 207764 - protein, 17 aa, Homo sapiens
MWLQSLLLLGTVACSIS

SEQ ID NO: 207765 - protein, 22 aa, Homo sapiens
MLLLVTSLLLCELPHPAFLLIP

SEQ ID NO: 207766 - DNA, 66 bp, Homo sapiens
atgcttctcctggtgacaagccttctgctctgtgagttaccacacccagcattcctcctgatccca

SEQ ID NO: 207767 - DNA, 66 bp, Homo sapiens
atgctgctgctcgtgacatctctgctgctgtgcgagctgccccaccccgcctttctgctgatcccc

SEQ ID NO: 207768 - protein, 26 aa, Homo sapiens
MRNSYRFLASSLSVVVSLLLIPEDVC

SEQ ID NO: 207769 - protein, 18 aa, Homo sapiens
MQPILLLLAFLLLPRADA

SEQ ID NO: 207770 - protein, 18 aa, Homo sapiens
MQPFLLLLAFLLTPGAGT

SEQ ID NO: 207771 - protein, 24 aa, Homo sapiens
MSRTAYTVGALLLLLGTLLPAAEG

SEQ ID NO: 207772 - protein, 19 aa, Homo sapiens
MKLASGFLVLWLSLGGGLA

SEQ ID NO: 207773 - protein, 26 aa, Homo sapiens
MAAGSRTSLLLAFGLLCLSWLQEGSA

SEQ ID NO: 207774 - protein, 34 aa, Homo sapiens
MARAALSAAPSNPRLLRVALLLLLLVAAGRRAAG

SEQ ID NO: 207775 - protein, 21 aa, Homo sapiens
MNAFLLFALCLLGAWAALAGG

SEQ ID NO: 207776 - protein, 18 aa, Homo sapiens
MSALGAVIALLLWGQLFA

SEQ ID NO: 207777 - protein, 31 aa, Homo sapiens
MLVRRGARAGPRMPRGWTALCLLSLLPSGFM

SEQ ID NO: 207778 - protein, 23 aa, Homo sapiens
MARVLGAPVALGLWSLCWSLAIA

SEQ ID NO: 207779 - protein, 35 aa, Homo sapiens
MLLRSKPALPPPLMLLLLGPLGPLSPGALPRPAQA

SEQ ID NO: 207780 - protein, 19 aa, Homo sapiens
MKHSLNALLIFLIITSAWG

SEQ ID NO: 207781 - protein, 22 aa, Homo sapiens
MDTSPLCFSILLVLCIFIQSSA

SEQ ID NO: 207782 - protein, 31 aa, Homo sapiens
MWVTKLLPALLLQHVLLHLLLLPIAIPYAEG

SEQ ID NO: 207783 - protein, 35 aa, Homo sapiens
MGRWAWVPSPWPPPGLGPFLLLLLLLLLLPRGFQP

SEQ ID NO: 207784 - protein, 22 aa, Homo sapiens
MGPRARPALLLLMLLQTAVLQG

SEQ ID NO: 207785 - protein, 15 aa, Homo sapiens
MWFLTTLLLWVPVDG

SEQ ID NO: 207786 - protein, 19 aa, Homo sapiens
MKFFVFALVLALMISMISA

SEQ ID NO: 207787 - protein, 19 aa, Homo sapiens
MKFFVFALILALMLSMTGA

SEQ ID NO: 207788 - protein, 18 aa, Homo sapiens
MKALIAALLLITLQYSCA

SEQ ID NO: 207789 - protein, 24 aa, Homo sapiens
MAVMAPRTLLLLLSGALALTQTWA

SEQ ID NO: 207790 - protein, 24 aa, Homo sapiens
MAVMAPRTLLLLLSGALALTHTWA

SEQ ID NO: 207791 - protein, 24 aa, Homo sapiens
MAVMAPRTLLLLLLGALALTQTWA

SEQ ID NO: 207792 - protein, 24 aa, Homo sapiens
MAIMAPRTLVLLLSGALALTQTWA

SEQ ID NO: 207793 - protein, 24 aa, Homo sapiens
MAVMPPRTLLLLLSGALALTQTWA

SEQ ID NO: 207794 - protein, 21 aa, Homo sapiens
MVDGTLLLLLSEALALTQTWA

SEQ ID NO: 207795 - protein, 21 aa, Homo sapiens
MAPRSLLLLLSGALALTDTWA

SEQ ID NO: 207796 - protein, 24 aa, Homo sapiens
MRVTAPRTVLLLLSGALALTETWA

SEQ ID NO: 207797 - protein, 24 aa, Homo sapiens
MRVTAPRTLLLLLWGAVALTETWA

SEQ ID NO: 207798 - protein, 24 aa, Homo sapiens
MRVTAPRTVLLLLSAALALTETWA

SEQ ID NO: 207799 - protein, 24 aa, Homo sapiens
MLVMAPRTVLLLLSAALALTETWA

SEQ ID NO: 207800 - protein, 24 aa, Homo sapiens
MRVTAPRTVLLLLWGAVALTETWA

SEQ ID NO: 207801 - protein, 24 aa, Homo sapiens
MRVTAPRTLLLLLWGALALTETWA

SEQ ID NO: 207802 - protein, 23 aa, Artificial Sequence
  Description of Artificial Sequence: Synthetic peptide
RVTAPRTLLLLLWGALALTETWA

SEQ ID NO: 207803 - protein, 24 aa, Homo sapiens
MRVMEPRTLILLLSGALALTETWA

SEQ ID NO: 207804 - protein, 24 aa, Homo sapiens
MRVMAPRTLILLLSGALALTETWA

SEQ ID NO: 207805 - protein, 24 aa, Homo sapiens
MRVMAPRTLLLLLSGALALTETWA

SEQ ID NO: 207806 - protein, 24 aa, Homo sapiens
MRVMAPQALLLLLSGALALIETWA

SEQ ID NO: 207807 - protein, 24 aa, Homo sapiens
MRVMAPRALLLLLSGGLALTETWA

SEQ ID NO: 207808 - protein, 25 aa, Homo sapiens
GSGWVPWVVALLVNLTRLDSSMTQG

SEQ ID NO: 207809 - protein, 28 aa, Homo sapiens
MRPEDRMFHIRAVILRALSLAFLLSLRG

SEQ ID NO: 207810 - protein, 29 aa, Homo sapiens
MMVLQVSAAPRTVALTALLMVLLTSVVQG

SEQ ID NO: 207811 - protein, 23 aa, Homo sapiens
MILNKALMLGALALTTVMSPCGG

SEQ ID NO: 207812 - protein, 32 aa, Artificial Sequence
  Description of Artificial Sequence: Synthetic Signal Sequence
MSWKKALRIPGGLRAATVTLMLSMLSTPVAEG

SEQ ID NO: 207813 - protein, 32 aa, Artificial Sequence
  Description of Artificial Sequence: Synthetic Signal Sequence
MSWKKALRIPGGLRVATVTLMLAMLSTPVAEG

SEQ ID NO: 207814 - protein, 23 aa, Homo sapiens
MILNKALLLGALALTTVMSPCGG

SEQ ID NO: 207815 - protein, 23 aa, Homo sapiens
MILNKALLLGALALTAVMSPCGG

SEQ ID NO: 207816 - protein, 32 aa, Artificial Sequence
  Description of Artificial Sequence: Synthetic Signal Sequence
MSWKKSLRIPGDLRVATVTLMLAILSSSLAEG

SEQ ID NO: 207817 - protein, 23 aa, Homo sapiens
MILNKALMLGSLALTTVMSPCGG

SEQ ID NO: 207818 - protein, 32 aa, Artificial Sequence
  Description of Artificial Sequence: Synthetic Signal Sequence
MSWKKALRIPGGLRVATVTLMLAMLSTSVAEG

SEQ ID NO: 207819 - protein, 32 aa, Artificial Sequence
  Description of Artificial Sequence: Synthetic Signal Sequence
MSWKKALRIPGDLRVATVTLMLAMLSSLLAEG

SEQ ID NO: 207820 - protein, 25 aa, Homo sapiens
MAISGVPVLGFFIIAVLMSAQESWA

SEQ ID NO: 207821 - protein, 29 aa, Homo sapiens
MVCLRLPGGSCMAVLTVTLMVLSSPLALA

SEQ ID NO: 207822 - protein, 29 aa, Homo sapiens
MVCLKLPGGSCMTALTVTLMVLSSPLALA

SEQ ID NO: 207823 - protein, 29 aa, Homo sapiens
MVCLKFPGGSCMAALTVTLMVLSSPLALA

SEQ ID NO: 207824 - protein, 29 aa, Homo sapiens
MVCLKLPGGSCMAALTVTLMVLSSPLALA

SEQ ID NO: 207825 - protein, 29 aa, Homo sapiens
MVCLKLPGGSSLAALTVTLMVLSSRLAFA

SEQ ID NO: 207826 - protein, 29 aa, Homo sapiens
MVCLKLPGGSCMAALTVTLTVLSSPLALA

SEQ ID NO: 207827 - protein, 32 aa, Artificial Sequence
  Description of Artificial Sequence: Synthetic Signal Sequence
MSWKMALQIPGGFWAAAVTVMLVMLSTPVAEA

SEQ ID NO: 207828 - protein, 23 aa, Homo sapiens
MFARMSDLHVLLLMALVGKTACG

SEQ ID NO: 207829 - protein, 19 aa, Homo sapiens
MDWTWRVFCLLAVAPGAHS

SEQ ID NO: 207830 - protein, 19 aa, Homo sapiens
  MOD_RES (5)..(8): Any amino acid
MDWTXXXXFLVAAATRVHS

SEQ ID NO: 207831 - protein, 19 aa, Homo sapiens
MDWTWRILFLVAAATGAHS

SEQ ID NO: 207832 - protein, 19 aa, Homo sapiens
MKHLWFLLLWCQLPDVGVL

SEQ ID NO: 207833 - protein, 19 aa, Homo sapiens
MDILCSTLLLLTVPSGVLS

SEQ ID NO: 207834 - protein, 19 aa, Homo sapiens
MEFGLSWLFLVAILKGVQC

SEQ ID NO: 207835 - protein, 20 aa, Homo sapiens
MGSQVHLLSFLLLWISDTRA

SEQ ID NO: 207836 - protein, 22 aa, Homo sapiens
MDMRVPAQLLGLLLLWLRRVRC

SEQ ID NO: 207837 - protein, 22 aa, Homo sapiens
MDMRVPAQLLGLLLLWLPGAKC

SEQ ID NO: 207838 - protein, 22 aa, Homo sapiens
MDMRVPAQLLGLLLLWLRGARC

SEQ ID NO: 207839 - protein, 4 aa, Homo sapiens
GSSG

SEQ ID NO: 207840 - protein, 20 aa, Homo sapiens
MRLPAQLLGLLMLWVPGSSG

SEQ ID NO: 207841 - protein, 20 aa, Homo sapiens
MEAPAQLLFLLLLWLPDTTG

SEQ ID NO: 207842 - protein, 20 aa, Homo sapiens
METPAQLLFLLLLWLPDTTG

SEQ ID NO: 207843 - protein, 4 aa, Artificial Sequence
  Description of Artificial Sequence: Synthetic peptide
VPSG

SEQ ID NO: 207844 - protein, 20 aa, Homo sapiens
MEAPAQLLFLLLLWLPDTTR

SEQ ID NO: 207845 - protein, 20 aa, Homo sapiens
MVLQTQVFISLLLWISGAYG

SEQ ID NO: 207846 - protein, 20 aa, Homo sapiens
MAWTPLFLFLLTCCPGGSNS

SEQ ID NO: 207847 - protein, 19 aa, Homo sapiens
MTCSPLLLTLLIHCTGSWA

SEQ ID NO: 207848 - protein, 19 aa, Homo sapiens
MAWAPLLLTLLAHCTDCWA

SEQ ID NO: 207849 - protein, 18 aa, Homo sapiens
MDWTWILFLVAAATRVHS

SEQ ID NO: 207850 - DNA, 54 bp, Homo sapiens
atggactggacatggatactcttcctggtagcagccgccacacgagtgcacagc

SEQ ID NO: 207851 - DNA, 54 bp, Homo sapiens
atggactggacctggattctgtttctggtggccgctgccacaagagtgcacagc

SEQ ID NO: 207852 - DNA, 54 bp, Homo sapiens
atggattggacctggattctgtttctggtggccgctgccacaagagtgcacagc

SEQ ID NO: 207853 - protein, 23 aa, Homo sapiens
MGVPRPQPWALGLLLFLLPGSLG

SEQ ID NO: 207854 - protein, 18 aa, Homo sapiens
MVLHLLLFLLLTPQGGHS

SEQ ID NO: 207855 - protein, 24 aa, Homo sapiens
MALWMRLLPLLALLALWGPDPAAA

SEQ ID NO: 207856 - protein, 24 aa, Homo sapiens
MAPRGCIVAVFAIFCISRLLCSHG

SEQ ID NO: 207857 - protein, 24 aa, Homo sapiens
MRPRCCILALVCWITVFLLQCSKG

SEQ ID NO: 207858 - protein, 27 aa, Homo sapiens
MGTGGRRGAAAAPLLVAVAALLLGAAG

SEQ ID NO: 207859 - protein, 20 aa, Homo sapiens
MDPRLPAWALVLLGPALVFA

SEQ ID NO: 207860 - protein, 30 aa, Homo sapiens
MKSGSGGGSPTSLWGLLFLSAALSLWPTSG

SEQ ID NO: 207861 - protein, 24 aa, Homo sapiens
MGIPMGKSMLVLLTFLAFASCCIA

SEQ ID NO: 207862 - protein, 25 aa, Homo sapiens
MSEVPVARVWLVLLLLTVQVGVTAG

SEQ ID NO: 207863 - protein, 39 aa, Homo sapiens
MLPRVGCPALPLPPPPLLPLLPLLLLLLGASGGGGGARA

SEQ ID NO: 207864 - protein, 27 aa, Homo sapiens
MQRARPTLWAAALTLLVLLRGPPVARA

SEQ ID NO: 207865 - protein, 21 aa, Homo sapiens
MLPLCLVAALLLAAGPGPSLG

SEQ ID NO: 207866 - protein, 26 aa, Homo sapiens
MERPSLRALLLGAAGLLLLLLPLSSS

SEQ ID NO: 207867 - protein, 27 aa, Homo sapiens
MALRKGGLALALLLLSWVALGPRSLEG

SEQ ID NO: 207868 - protein, 22 aa, Homo sapiens
MKGSIFTLFLFSVLFAISEVRS

SEQ ID NO: 207869 - protein, 29 aa, Homo sapiens
MGPERTGAAPLPLLLVLALSQGILNCCLA

SEQ ID NO: 207870 - protein, 32 aa, Homo sapiens
MGPGPSRAPRAPRLMLCALALMVAAGGCVVSA

SEQ ID NO: 207871 - protein, 39 aa, Homo sapiens
MFPTESAWLGKRGANPGPEAAVRETVMLLLCLGVPTGRP

SEQ ID NO: 207872 - protein, 41 aa, Homo sapiens
MGSRTPESPLHAVQLRWGPRRRPPLLPLLLLLLPPPPRVGG

SEQ ID NO: 207873 - protein, 23 aa, Homo sapiens
MAAAGQLCLLYLSAGLLSRLGAA

SEQ ID NO: 207874 - protein, 33 aa, Homo sapiens
MAGARSRDPWGASGICYLFGSLLVELLFSRAVA

SEQ ID NO: 207875 - protein, 18 aa, Homo sapiens
MWLFHTLLCIASLALLAA

SEQ ID NO: 207876 - protein, 31 aa, Homo sapiens
MARALCPLQALWLLEWVLLLLGPCAAPPAWA

SEQ ID NO: 207877 - protein, 25 aa, Homo sapiens
MKDSCITVMAMALLSGFFFFAPASS

SEQ ID NO: 207878 - protein, 16 aa, Homo sapiens
MALRVLLLTALTLCHG

SEQ ID NO: 207879 - protein, 30 aa, Homo sapiens
MAFPPRRRLRLGPRGLPLLLSGLLLPLCRA

SEQ ID NO: 207880 - protein, 19 aa, Homo sapiens
MTRTRAALLLFTALATSLG

SEQ ID NO: 207881 - protein, 20 aa, Homo sapiens
MNLQPIFWIGLISSVCCVFA

SEQ ID NO: 207882 - protein, 22 aa, Homo sapiens
MLGLRPPLLALVGLLSLGCVLS

SEQ ID NO: 207883 - protein, 27 aa, Homo sapiens
MAGPRPSPWARLLLAALISVSLSGTLA

SEQ ID NO: 207884 - protein, 19 aa, Homo sapiens
MVALPMVLVLLLVLSRGES

SEQ ID NO: 207885 - protein, 18 aa, Homo sapiens
MNQLSFLLFLIATTRGWS

SEQ ID NO: 207886 - protein, 28 aa, Artificial Sequence
  Description of Artificial Sequence: Synthetic Signal Sequence
MKPPRPVRTCSKVLVLLSLLAIHQTTTA

SEQ ID NO: 207887 - protein, 27 aa, Homo sapiens
MAPSSPRPALPALLVLLGALFPGPGNA

SEQ ID NO: 207888 - protein, 23 aa, Homo sapiens
MASPFALLMVLVVLSCKSSCSLG

SEQ ID NO: 207889 - protein, 23 aa, Homo sapiens
MALSFSLLMAVLVLSYKSICSLG

SEQ ID NO: 207890 - protein, 23 aa, Homo sapiens
MALPFALMMALVVLSCKSSCSLG

SEQ ID NO: 207891 - protein, 23 aa, Homo sapiens
MALTFALLVALLVLSCKSSCSVG

SEQ ID NO: 207892 - protein, 21 aa, Homo sapiens
MALPFVLLMALVVLNCKSICS

SEQ ID NO: 207893 - protein, 20 aa, Homo sapiens
MALPFALLMALVVLSCKSSC

SEQ ID NO: 207894 - protein, 23 aa, Homo sapiens
MARSFSLLMVVLVLSYKSICSLG

SEQ ID NO: 207895 - protein, 23 aa, Homo sapiens
MALTFYLLVALVVLSYKSFSSLG

SEQ ID NO: 207896 - protein, 21 aa, Homo sapiens
MTNKCLLQIALLLCFSTTALS

SEQ ID NO: 207897 - protein, 27 aa, Artificial Sequence
  Description of Artificial Sequence: Synthetic Signal Sequence
MSTKPDMIQKCLWLEILMGIFIAGTLS

SEQ ID NO: 207898 - protein, 21 aa, Homo sapiens
MALLFPLLAALVMTSYSPVGS

SEQ ID NO: 207899 - protein, 26 aa, Homo sapiens
MLLSQNAFIFRSLNLVLMVYISLVFG

SEQ ID NO: 207900 - protein, 17 aa, Homo sapiens
MALLFLLPLVMQGVSRA

SEQ ID NO: 207901 - protein, 30 aa, Homo sapiens
MAPRRARGCRTLGLPALLLLLLLRPPATRG

SEQ ID NO: 207902 - DNA, 90 bp, Homo sapiens
atggccccgcggcgggcgcgcggctgccggaccctcggtctcccggcgctgctactgctgctgctgctccggccgccggcgacgcggggc

SEQ ID NO: 207903 - protein, 24 aa, Homo sapiens
MKASSLAFSLLSAAFYLLWTPSTG

SEQ ID NO: 207904 - protein, 25 aa, Homo sapiens
MEICRGLRSHLITLLLFLFHSETIC

SEQ ID NO: 207905 - protein, 17 aa, Homo sapiens
MKVLLRLICFIALLISS

SEQ ID NO: 207906 - protein, 18 aa, Homo sapiens
MGFWILAILTILMYSTAA

SEQ ID NO: 207907 - protein, 19 aa, Homo sapiens
MWSLLLCGLSIALPLSVTA

SEQ ID NO: 207908 - protein, 18 aa, Homo sapiens
MHSSALLCCLVLLTGVRA

SEQ ID NO: 207909 - protein, 21 aa, Homo sapiens
MLPCLVVLLAALLSLRLGSDA

SEQ ID NO: 207910 - protein, 19 aa, Homo sapiens
MAWSLGSWLGGCLLVSALG

SEQ ID NO: 207911 - protein, 22 aa, Homo sapiens
MCPARSLLLVATLVLLDHLSLA

SEQ ID NO: 207912 - protein, 22 aa, Homo sapiens
MCHQQLVISWFSLVFLASPLVA

SEQ ID NO: 207913 - DNA, 66 bp, Homo sapiens
atgtgtcaccagcagttggtcatctcttggttttccctggtttttctggcatctcccctcgtggcc

SEQ ID NO: 207914 - DNA, 66 bp, Homo sapiens
atgtgccaccagcagctggtcatcagctggttctccctggtgtttctggcatcccctctggtggca

SEQ ID NO: 207915 - DNA, 66 bp, Homo sapiens
atgtgccaccagcagctggtcatcagctggttctccctggtgtttctggccagccctctggtggcc

SEQ ID NO: 207916 - DNA, 66 bp, Homo sapiens
atgtgccaccagcagctggtcatcagctggttctccctggtgtttctggcaagccctctggtggca

SEQ ID NO: 207917 - DNA, 66 bp, Homo sapiens
atgtgccaccagcagctggtcatcagctggttctccctggtgtttctggcatccccactggtggca

SEQ ID NO: 207918 - DNA, 66 bp, Homo sapiens
atgtgccaccaacagctcgtgatcagctggttctccctggtgttcctggctagccccctggtggcc

SEQ ID NO: 207919 - DNA, 66 bp, Homo sapiens
atgtgccaccagcagctggtcatctcttggttcagcctggtgtttctggcctcccccctggtggcc

SEQ ID NO: 207920 - DNA, 66 bp, Homo sapiens
atgtgccaccagcagctggtcatctcctggttctctctggtgtttctggcatctcctctggtggca

SEQ ID NO: 207921 - DNA, 66 bp, Homo sapiens
atgtgccaccagcagctggtcatctcttggttcagcctggtgtttctggcatccccactggtggca

SEQ ID NO: 207922 - protein, 32 aa, Homo sapiens
MGAARSPPSAVPGPLLGLLLLLLGVLAPGGAS

SEQ ID NO: 207923 - protein, 17 aa, Homo sapiens
MSLVLLSLAALCRSAVP

SEQ ID NO: 207924 - protein, 20 aa, Homo sapiens
MPVPWFLLSLALGRSPVVLS

SEQ ID NO: 207925 - protein, 23 aa, Homo sapiens
MTPGKTSLVSLLLLLSLEAIVKA

SEQ ID NO: 207926 - protein, 20 aa, Homo sapiens
MVKYLLLSILGLAFLSEAAA

SEQ ID NO: 207927 - protein, 18 aa, Homo sapiens
MNCRELPLTLWVLISVST

SEQ ID NO: 207928 - protein, 28 aa, Homo sapiens
MRHNWTPDLSPLWVLLLCAHVVTLLVRA

SEQ ID NO: 207929 - protein, 24 aa, Homo sapiens
MKLQCVSLWLLGTILILCSVDNHG

SEQ ID NO: 207930 - protein, 20 aa, Homo sapiens
MYRMQLLSCIALSLALVTNS

SEQ ID NO: 207931 - DNA, 60 bp, Homo sapiens
atgtaccgaatgcaactgctgagctgcatcgccctgagcctggcactcgtgaccaacagc

SEQ ID NO: 207932 - DNA, 60 bp, Homo sapiens
atgtacaggatgcagctgctgagctgcatcgccctgagcctggccctggtgaccaacagc

SEQ ID NO: 207933 - DNA, 60 bp, Homo sapiens
atgtacagaatgcagctgctgagctgcatcgccctgtccctcgccctggtgaccaactcc

SEQ ID NO: 207934 - DNA, 60 bp, Homo sapiens
atgtacaggatgcaactcctgtcttgcattgcactaagtcttgcacttgtcacaaacagt

SEQ ID NO: 207935 - protein, 21 aa, Homo sapiens
MDSYLLMWGLLTFIMVPGCQA

SEQ ID NO: 207936 - protein, 26 aa, Homo sapiens
MAAPALSWRLPLLILLLPLATSWASA

SEQ ID NO: 207937 - protein, 29 aa, Homo sapiens
MQTFTMVLEEIWTSLFMWFFYALIPCLLT

SEQ ID NO: 207938 - protein, 19 aa, Homo sapiens
MPRGWAAPLLLLLLQGGWG

SEQ ID NO: 207939 - protein, 33 aa, Homo sapiens
MAALQKSVSSFLMGTLATSCLLLLALLVQGGAA

SEQ ID NO: 207940 - protein, 21 aa, Homo sapiens
MMPKHCFLGFLISFFLTGVAG

SEQ ID NO: 207941 - protein, 51 aa, Homo sapiens
MNFQQRLQSLWTLARPFCPPLLATASQMQMVVLPCLGFTLLLWSQVSGAQG

SEQ ID NO: 207942 - protein, 32 aa, Homo sapiens
MRERPRLGEDSSLISLFLQVVAFLAMVMGTHT

SEQ ID NO: 207943 - protein, 19 aa, Homo sapiens
MSRLPVLLLLQLLVRPGLQ

SEQ ID NO: 207944 - protein, 19 aa, Homo sapiens
MMWTWALWMLPSLCKFSLA

SEQ ID NO: 207945 - protein, 24 aa, Homo sapiens
MGLTSQLLPPLFFLLACAGNFVHG

SEQ ID NO: 207946 - protein, 19 aa, Homo sapiens
MRMLLHLSLLALGAAYVYA

SEQ ID NO: 207947 - protein, 20 aa, Homo sapiens
MIIVAHVLLILLGATEILQA

SEQ ID NO: 207948 - protein, 29 aa, Homo sapiens
MNSFSTSAFGPVAFSLGLLLVLPAAFPAP

SEQ ID NO: 207949 - protein, 19 aa, Homo sapiens
MLAVGCALLAALLAAPGAA

SEQ ID NO: 207950 - protein, 22 aa, Homo sapiens
MLTLQTWLVQALFIFLTTESTG

SEQ ID NO: 207951 - protein, 25 aa, Homo sapiens
MFHVSFRYIFGLPPLILVLLPVASS

SEQ ID NO: 207952 - protein, 20 aa, Homo sapiens
MTILGTTFGMVFSLLQVVSG

SEQ ID NO: 207953 - protein, 20 aa, Homo sapiens
MTSKLAVALLAAFLISAALC

SEQ ID NO: 207954 - protein, 18 aa, Homo sapiens
MLLAMVLTSALLLCSVAG

SEQ ID NO: 207955 - protein, 17 aa, Homo sapiens
MMREWVLLMSVLLCGLA

SEQ ID NO: 207956 - protein, 19 aa, Homo sapiens
MHSFPPLLLLLFWGVVSHS

SEQ ID NO: 207957 - protein, 19 aa, Homo sapiens
MQGPWVLLLLGLRLQLSLG

SEQ ID NO: 207958 - protein, 27 aa, Homo sapiens
MGTKAQVERKLLCLFILAILLCSLALG

SEQ ID NO: 207959 - protein, 28 aa, Homo sapiens
MARRSRHRLLLLLLRYLVVALGYHKAYG

SEQ ID NO: 207960 - protein, 31 aa, Homo sapiens
MALRRPPRLRLCARLPDFFLLLLFRGCLIGA

SEQ ID NO: 207961 - protein, 19 aa, Homo sapiens
MFCPLKLILLPVLLDYSLG

SEQ ID NO: 207962 - protein, 22 aa, Homo sapiens
MARSLLLPLQILLLSLALETAG

SEQ ID NO: 207963 - protein, 20 aa, Homo sapiens
MKSFLLVVNALALTLPFLAV

SEQ ID NO: 207964 - protein, 30 aa, Homo sapiens
MLPPPRPAAALALPVLLLLLVVLTPPPTGA

SEQ ID NO: 207965 - protein, 31 aa, Homo sapiens
MHKWILTWILPTLLYRSCFHIICLVGTISLA

SEQ ID NO: 207966 - protein, 21 aa, Homo sapiens
MSLLVVSMACVGFFLLQGAWP

SEQ ID NO: 207967 - protein, 20 aa, Homo sapiens
MLRMRVPALLVLLFCFRGRA

SEQ ID NO: 207968 - protein, 18 aa, Homo sapiens
MKLITILFLCSRLLLSLT

SEQ ID NO: 207969 - protein, 25 aa, Homo sapiens
MKKTQTWILTCIYLQLLLFNPLVKT

SEQ ID NO: 207970 - protein, 23 aa, Homo sapiens
MEWWASSPLRLWLLLFLLPSAQG

SEQ ID NO: 207971 - protein, 35 aa, Homo sapiens
MAPARTMARARLAPAGIPAVALWLLCTLGLQGTQA

SEQ ID NO: 207972 - protein, 27 aa, Homo sapiens
MAQLCGLRRSRAFLALLGSLLLSGVLA

SEQ ID NO: 207973 - protein, 23 aa, Homo sapiens
MPRPRLLAALCGALLCAPSLLVA

SEQ ID NO: 207974 - protein, 21 aa, Homo sapiens
MKPVWVATLLWMLLLVPRLGA

SEQ ID NO: 207975 - protein, 19 aa, Homo sapiens
MELSWHVVFIALLSFSCWG

SEQ ID NO: 207976 - protein, 19 aa, Homo sapiens
MKLVFLVLLFLGALGLCLA

SEQ ID NO: 207977 - protein, 21 aa, Homo sapiens
MGLLQLLAFSFLALCRARVRA

SEQ ID NO: 207978 - protein, 33 aa, Homo sapiens
MRGSHRAAPALRPRGRLWPVLAVLAAAAAAGCA

SEQ ID NO: 207979 - protein, 21 aa, Homo sapiens
MAPLALHLLVLVPILLSLVAS

SEQ ID NO: 207980 - protein, 21 aa, Homo sapiens
MICQKFCVVLLHWEFIYVITA

SEQ ID NO: 207981 - protein, 35 aa, Homo sapiens
MSSWSRQRPKSPGGIQPHVSRTLFLLLLLAASAWG

SEQ ID NO: 207982 - protein, 25 aa, Homo sapiens
MARMSFVIAACQLVLGLLMTSLTES

SEQ ID NO: 207983 - protein, 35 aa, Homo sapiens
MGLQTTKWPSHGAFFLKSWLIISLGLYSQVSKLLA

SEQ ID NO: 207984 - protein, 47 aa, Homo sapiens
MGSLQHCCCLLPKMGDTWAQLPWPGPPHPAMLLISLLLAAGLMHSDA

SEQ ID NO: 207985 - protein, 22 aa, Homo sapiens
MKVLAAGVVPLLLVLHWKHGAG

SEQ ID NO: 207986 - protein, 23 aa, Homo sapiens
MYLWLKLLAFGFAFLDTEVFVTG

SEQ ID NO: 207987 - protein, 23 aa, Homo sapiens
MTPILTVLICLGLSLDPRTHVQA

SEQ ID NO: 207988 - protein, 19 aa, Homo sapiens
MATLLLLLGVLVVSPDALG

SEQ ID NO: 207989 - protein, 21 aa, Homo sapiens
MAQVKLQESGTELAKPGAAVK

SEQ ID NO: 207990 - protein, 18 aa, Artificial Sequence
  Description of Artificial Sequence: Synthetic Signal Sequence
MKPLLLAVSLGLIAALQA

SEQ ID NO: 207991 - protein, 25 aa, Homo sapiens
MGALARALPSILLALLLTSTPEALG

SEQ ID NO: 207992 - protein, 27 aa, Homo sapiens
MESKALLVLTLAVWLQSLTASRGGVAA

SEQ ID NO: 207993 - protein, 22 aa, Homo sapiens
MAQTSSYFMLISCLMFLSQSQG

SEQ ID NO: 207994 - protein, 18 aa, Homo sapiens
MWLRAFILATLSASAAWG

SEQ ID NO: 207995 - protein, 33 aa, Homo sapiens
MTMETQMSQNVCPRNLWLLQPLTVLLLLASADS

SEQ ID NO: 207996 - protein, 21 aa, Homo sapiens
MGPWGWKLRWTVALLLAAAGT

SEQ ID NO: 207997 - protein, 28 aa, Homo sapiens
MIFPWKCQSTQRDLWNIFKLWGWTMLCC

SEQ ID NO: 207998 - protein, 18 aa, Homo sapiens
MSLSAFTLFLALIGGTSG

SEQ ID NO: 207999 - protein, 31 aa, Homo sapiens
MEPPDAPAQARGAPRLLLLAVLLAAHPDAQA

SEQ ID NO: 208000 - protein, 20 aa, Homo sapiens
MEMLQGLLLLLLLSMGGAWA

SEQ ID NO: 208001 - protein, 25 aa, Homo sapiens
MAMGVPRVILLCLFGAALCLTGSQA

SEQ ID NO: 208002 - protein, 22 aa, Homo sapiens
MEPGPALAWLLLLSLLADCLKA

SEQ ID NO: 208003 - protein, 21 aa, Homo sapiens
MASRWAVQLLLVAAWSMGCGE

SEQ ID NO: 208004 - protein, 28 aa, Homo sapiens
MWEAQFLGLLFLQPLWVAPVKPLQPGAE

SEQ ID NO: 208005 - protein, 20 aa, Homo sapiens
MRTALLLLAALAVATGPALT

SEQ ID NO: 208006 - protein, 27 aa, Homo sapiens
MRTGWATPRRPAGLLMLLFWFFDLAEP

SEQ ID NO: 208007 - protein, 20 aa, Homo sapiens
MKGFTATLFLWTLIFPSCSG

SEQ ID NO: 208008 - protein, 28 aa, Homo sapiens
MVAGSDAGRALGVLSVVCLLHCFGFISC

SEQ ID NO: 208009 - protein, 34 aa, Homo sapiens
MTPPERLFLPRVCGTTLHLLLLGLLLVLLPGAQG

SEQ ID NO: 208010 - protein, 32 aa, Homo sapiens
MITGVFSMRLWTPVGVLTSLAYCLHQRRVALA

SEQ ID NO: 208011 - protein, 30 aa, Homo sapiens
MAGKRSGWSRAALLQLLLGVNLVVMPPTRA

SEQ ID NO: 208012 - protein, 49 aa, Homo sapiens
MGAYARASGVCARGCLDSAGPWTMSRALRPPLPPLCFFLLLLAAAGARA

SEQ ID NO: 208013 - protein, 28 aa, Homo sapiens
MIRAAPPPLFLLLLLLLLLVSWASRGEA

SEQ ID NO: 208014 - protein, 27 aa, Homo sapiens
MAPRSARRPLLLLLPVAAARPHALSSA

SEQ ID NO: 208015 - protein, 28 aa, Homo sapiens
MVCFRLFPVPGSGLVLVCLVLGAVRSYA

SEQ ID NO: 208016 - protein, 18 aa, Homo sapiens
MKALIVLGLVLLSVTVQG

SEQ ID NO: 208017 - protein, 32 aa, Homo sapiens
MTAPGAAGRCPPTTWLGSLLLLVCLLASRSIT

SEQ ID NO: 208018 - protein, 22 aa, Homo sapiens
MGELMAFLLPLIIVLMVKHSDS

SEQ ID NO: 208019 - protein, 18 aa, Homo sapiens
MKLLMVLMLAALLLHCYA

SEQ ID NO: 208020 - protein, 20 aa, Homo sapiens
MSLFPSLPLLLLSMVAASYS

SEQ ID NO: 208021 - protein, 15 aa, Homo sapiens
MRLILPVGLIATTLA

SEQ ID NO: 208022 - protein, 17 aa, Homo sapiens
MRLTVLCAVCLLPGSLA

SEQ ID NO: 208023 - protein, 19 aa, Homo sapiens
MKSLILLAILAALAVVTLC

SEQ ID NO: 208024 - protein, 19 aa, Homo sapiens
MSLWQPLVLVLLVLGCCFA

SEQ ID NO: 208025 - protein, 24 aa, Homo sapiens
MDLVLKRCLLHLAVIGALLAVGAT

SEQ ID NO: 208026 - protein, 24 aa, Homo sapiens
MARSLVCLGVIILLSAFSGPGVRG

SEQ ID NO: 208027 - protein, 19 aa, Homo sapiens
MRGPSGALWLLLALRTVLG

SEQ ID NO: 208028 - protein, 34 aa, Homo sapiens
MEPPGRRECPFPSWRFPGLLLAAMVLLLYSFSDA

SEQ ID NO: 208029 - protein, 17 aa, Artificial Sequence
  Description of Artificial Sequence: Synthetic Signal Sequence
MKLVNIWLLLLVVLLCG

SEQ ID NO: 208030 - protein, 36 aa, Homo sapiens
MALPTARPLLGSCGTPALGSLLFLLFSLGWVQPSRT

SEQ ID NO: 208031 - protein, 23 aa, Homo sapiens
MAPFEPLASGILLLLWLIAPSRA

SEQ ID NO: 208032 - protein, 26 aa, Homo sapiens
MGAAARTLRLALGLLLLATLLRPADA

SEQ ID NO: 208033 - protein, 23 aa, Homo sapiens
MTPWLGLIVLLGSWSLGDWGAEA

SEQ ID NO: 208034 - protein, 23 aa, Homo sapiens
MGLGPVFLLLAGIFPFAPPGAAA

SEQ ID NO: 208035 - protein, 21 aa, Homo sapiens
MKALLALPLLLLLSTPPCAPQ

SEQ ID NO: 208036 - protein, 20 aa, Homo sapiens
MQHRGFLLLTLLALLALTSA

SEQ ID NO: 208037 - protein, 20 aa, Homo sapiens
MKTLQSTLLLLLLVPLIKPA

SEQ ID NO: 208038 - protein, 19 aa, Homo sapiens
MERASCLLLLLLPLVHVSA

SEQ ID NO: 208039 - protein, 23 aa, Homo sapiens
MTPGTQSPFFLLLLLTVLTVVTG

SEQ ID NO: 208040 - protein, 20 aa, Homo sapiens
MKFLAVLVLLGVSIFLVSAQ

SEQ ID NO: 208041 - protein, 29 aa, Homo sapiens
MAPGAPSSSPSPILAVLLFSSLVLSPAQA

SEQ ID NO: 208042 - protein, 31 aa, Homo sapiens
MQQRGAAGSRGCALFPLLGVLFFQGVYIVFS

SEQ ID NO: 208043 - protein, 19 aa, Homo sapiens
MIFLTALPLFWIMISASRG

SEQ ID NO: 208044 - protein, 29 aa, Homo sapiens
MASLSRPSLPSCLCSFLLLLLLQVSSSYA

SEQ ID NO: 208045 - protein, 25 aa, Homo sapiens
MAHRPPSPALASVLLALLLSGAARA

SEQ ID NO: 208046 - protein, 48 aa, Homo sapiens
MGVPFFSSLRCMVDLGPCWAGGLTAEMKLLLALAGLLAILATPQPSEG

SEQ ID NO: 208047 - protein, 23 aa, Homo sapiens
MARKSNLPVLLVPFLLCQALVRC

SEQ ID NO: 208048 - protein, 26 aa, Homo sapiens
MAAVVAATRWWQLLLVLSAAGMGASG

SEQ ID NO: 208049 - protein, 36 aa, Homo sapiens
MRLLPLAPGRLRRGSPRHLPSCSPALLLLVLGGCLG

SEQ ID NO: 208050 - protein, 21 aa, Homo sapiens
MAQGVLWILLGLLLWSDPGTA

SEQ ID NO: 208051 - protein, 26 aa, Homo sapiens
MDPQTAPSRALLLLLFLHLAFLGGRS

SEQ ID NO: 208052 - protein, 21 aa, Homo sapiens
MLGQVVTLILLLLLKVYQGKG

SEQ ID NO: 208053 - protein, 19 aa, Homo sapiens
MAGPSLACCLLGLLALTSA

SEQ ID NO: 208054 - protein, 19 aa, Homo sapiens
MVVALRYVWPLLLCSPCLL

SEQ ID NO: 208055 - protein, 22 aa, Homo sapiens
MQLTRCCFVFLVQGSLYLVICG

SEQ ID NO: 208056 - protein, 15 aa, Homo sapiens
MLRVLVGAVLPAMLL

SEQ ID NO: 208057 - protein, 26 aa, Homo sapiens
MVSRMVSTMLSGLLFWLASGWTPAFA

SEQ ID NO: 208058 - protein, 41 aa, Homo sapiens
MSRPQGLLWLPLLFTPVCVMLNSNVLLWLTALAIKFTLIDS

SEQ ID NO: 208059 - protein, 24 aa, Homo sapiens
MARRAGGARMFGSLLLFALLAAGV

SEQ ID NO: 208060 - protein, 22 aa, Homo sapiens
MALERLCSVLKVLLITVLVVEG

SEQ ID NO: 208061 - protein, 21 aa, Homo sapiens
MERGLPLLCAVLALVLAPAGA

SEQ ID NO: 208062 - protein, 28 aa, Homo sapiens
MSGSSLPSALALSLLLVSGSLLPGPGAA

SEQ ID NO: 208063 - protein, 33 aa, Homo sapiens
MGVCGYLFLPWKCLVVVSLRLLFLVPTGVPVRS

SEQ ID NO: 208064 - protein, 20 aa, Homo sapiens
MFSLKTLPFLLLLHVQISKA

SEQ ID NO: 208065 - protein, 19 aa, Homo sapiens
MRTLAILAAILLVALQAQA

SEQ ID NO: 208066 - protein, 20 aa, Homo sapiens
MPLGLLWLGLALLGALHAQA

SEQ ID NO: 208067 - protein, 28 aa, Homo sapiens
MLASSSRIRAAWTRALLLPLLLAGPVGC

SEQ ID NO: 208068 - protein, 30 aa, Homo sapiens
MEGDRVAGRPVLSSLPVLLLLQLLMLRAAA

SEQ ID NO: 208069 - protein, 25 aa, Homo sapiens
MAAAAATKILLCLPLLLLLSGWSRA

SEQ ID NO: 208070 - protein, 34 aa, Homo sapiens
MESPSAPPHRWCIPWQRLLLTASLLTFWNPPTTA

SEQ ID NO: 208071 - protein, 27 aa, Homo sapiens
MVPKLFTSQICLLLLLGLLAVEGSLHV

SEQ ID NO: 208072 - protein, 19 aa, Homo sapiens
MRFLAATFLLLALSTAAQA

SEQ ID NO: 208073 - protein, 20 aa, Homo sapiens
MSCPVPACCALLLVLGLCRA

SEQ ID NO: 208074 - protein, 30 aa, Homo sapiens
DVSLCPAKCSFWRIFLLGSVWLDYVGSVLA

SEQ ID NO: 208075 - protein, 29 aa, Homo sapiens
MRAPGRPALRPLPLPPLLLLLLAAPWGRA

SEQ ID NO: 208076 - protein, 28 aa, Homo sapiens
MMVALRGASALLVLFLAAFLPPPQCTQD

SEQ ID NO: 208077 - protein, 24 aa, Homo sapiens
MEYQILKMSLCLFILLFLTPGILC

SEQ ID NO: 208078 - protein, 25 aa, Homo sapiens
MGVLLTQRTLLSLVLALLFPSMASM

SEQ ID NO: 208079 - protein, 17 aa, Homo sapiens
MARILLLFLPGLVAVCA

SEQ ID NO: 208080 - protein, 29 aa, Homo sapiens
MAAARLCLSLLLLSTCVALLLQPLLGAQG

SEQ ID NO: 208081 - protein, 23 aa, Homo sapiens
MKVTGIFLLSALALLSLSGNTGA

SEQ ID NO: 208082 - protein, 16 aa, Homo sapiens
MLPLWTLSLLLGAVAG

SEQ ID NO: 208083 - protein, 25 aa, Homo sapiens
MIPAKDMAKVMIVMLAICFLTKSDG

SEQ ID NO: 208084 - protein, 15 aa, Homo sapiens
MKWLLLLGLVALSEC

SEQ ID NO: 208085 - protein, 27 aa, Homo sapiens
MHGSCSFLMLLLPLLLLLVATTGPVGA

SEQ ID NO: 208086 - protein, 28 aa, Homo sapiens
MVFVRRPWPALTTVLLALLVCLGALVDA

SEQ ID NO: 208087 - protein, 20 aa, Homo sapiens
MGLPGLFCLAVLAASSFSKA

SEQ ID NO: 208088 - protein, 25 aa, Homo sapiens
MKVLLAAALIAGSVFFLLLPGPSAA

SEQ ID NO: 208089 - protein, 21 aa, Homo sapiens
MAARLLLLGILLLLLPLPVPA

SEQ ID NO: 208090 - protein, 24 aa, Homo sapiens
MGPPGSPWQWVTLLLGLLLPPAAP

SEQ ID NO: 208091 - protein, 22 aa, Homo sapiens
MGWTMRLVTAALLLGLMMVVTG

SEQ ID NO: 208092 - protein, 23 aa, Homo sapiens
MSAFRLWPGLLIMLGSLCHRGSP

SEQ ID NO: 208093 - protein, 21 aa, Homo sapiens
MLLAWVQAFLVSNMLLAEAYG

SEQ ID NO: 208094 - protein, 15 aa, Homo sapiens
MKLLVLAVLLTVAAA

SEQ ID NO: 208095 - protein, 20 aa, Homo sapiens
MKTLLLLAVIMIFGLLQAHG

SEQ ID NO: 208096 - protein, 17 aa, Homo sapiens
MALFGALFLALLAGAHA

SEQ ID NO: 208097 - protein, 18 aa, Homo sapiens
MPVMRLFPCFLQLLAGLA

SEQ ID NO: 208098 - protein, 18 aa, Homo sapiens
MRACISLVLAVLCGLAWA

SEQ ID NO: 208099 - protein, 19 aa, Homo sapiens
MILFKQATYFISLFATVSC

SEQ ID NO: 208100 - protein, 22 aa, Homo sapiens
MASRLTLLTLLLLLLAGDRASS

SEQ ID NO: 208101 - protein, 19 aa, Homo sapiens
MQLFLLLCLVLLSPQGASL

SEQ ID NO: 208102 - protein, 19 aa, Homo sapiens
MEHKEVVLLLLLFLKSGQG

SEQ ID NO: 208103 - protein, 23 aa, Homo sapiens
MQMSPALTCLVLGLALVFGEGSA

SEQ ID NO: 208104 - protein, 34 aa, Homo sapiens
MSLRLDTTPSCNSARPLHALQVLLLLSLLLTALA

SEQ ID NO: 208105 - protein, 27 aa, Homo sapiens
MQPRWAQGATMWLGVLLTLLLCSSLEG

SEQ ID NO: 208106 - protein, 31 aa, Homo sapiens
MSSAAGFCASRPGLLFLGLLLLPLVVAFASA

SEQ ID NO: 208107 - protein, 30 aa, Homo sapiens
MSSAARSRLTRATRQEMLFLALLLLPVVVA

SEQ ID NO: 208108 - protein, 16 aa, Homo sapiens
MPLLLLLLLLPSPLHP

SEQ ID NO: 208109 - protein, 26 aa, Homo sapiens
MGSGPRGALSLLLLLLAPPSRPAAGC

SEQ ID NO: 208110 - protein, 16 aa, Homo sapiens
MPAWGALFLLWATAEA

SEQ ID NO: 208111 - protein, 32 aa, Homo sapiens
MGVPTALEAGSWRWGSLLFALFLAASLGPVAA

SEQ ID NO: 208112 - protein, 21 aa, Homo sapiens
MVPPKLHVLFCLCGCLAVVYP

SEQ ID NO: 208113 - protein, 20 aa, Homo sapiens
MRTLACLLLLGCGYLAHVLA

SEQ ID NO: 208114 - protein, 20 aa, Homo sapiens
MNRCWALFLSLCCYLRLVSA

SEQ ID NO: 208115 - protein, 32 aa, Homo sapiens
MQAQQYQQQRRKFAAAFLAFIFILAAVDTAEA

SEQ ID NO: 208116 - protein, 18 aa, Homo sapiens
MLLFVLTCLLAVFPAIST

SEQ ID NO: 208117 - protein, 26 aa, Homo sapiens
MGLGARGAWAALLLGTLQVLALLGAA

SEQ ID NO: 208118 - protein, 25 aa, Homo sapiens
MRKDRLLHLCLVLLLILLSASDSNS

SEQ ID NO: 208119 - protein, 34 aa, Homo sapiens
MGTLSAPPCTQRIKWKGLLLTASLLNFWNLPTTA

SEQ ID NO: 208120 - protein, 34 aa, Homo sapiens
MGPLSAPPCTEHIKWKGLLVTASLLNFWNLPTTA

SEQ ID NO: 208121 - protein, 22 aa, Homo sapiens
MARAPPLLAALTALLAAAAAGG

SEQ ID NO: 208122 - protein, 16 aa, Homo sapiens
MYALFLLASLLGAALA

SEQ ID NO: 208123 - protein, 20 aa, Homo sapiens
MATPRGLGALLLLLLLPTSG

SEQ ID NO: 208124 - protein, 23 aa, Homo sapiens
MRGANAWAPLCLLLAAATQLSRQ

SEQ ID NO: 208125 - protein, 23 aa, Artificial Sequence
  Description of Artificial Sequence: Synthetic Signal Sequence
MKPIQKLLAGLILLTWCVEGCSS

SEQ ID NO: 208126 - protein, 19 aa, Homo sapiens
MIFLLLMLSLELQLHQIAA

SEQ ID NO: 208127 - protein, 19 aa, Homo sapiens
MRGATRVSIMLLLVTVSDC

SEQ ID NO: 208128 - protein, 27 aa, Homo sapiens
MRSLCCAPLLLLLLLPPLLLTPRAGDA

SEQ ID NO: 208129 - protein, 28 aa, Homo sapiens
MNIKGSPWKGSLLLLLVSNLLLCQSVAP

SEQ ID NO: 208130 - protein, 24 aa, Homo sapiens
MKENVASATVFTLLLFLNTCLLNG

SEQ ID NO: 208131 - protein, 28 aa, Homo sapiens
MRLLQLLFRASPATLLLVLCLQLGANKA

SEQ ID NO: 208132 - protein, 27 aa, Homo sapiens
MASSPWGCVCGLLLLLLPLLGTGPALG

SEQ ID NO: 208133 - protein, 17 aa, Homo sapiens
MIWYILIIGILLPQSLA

SEQ ID NO: 208134 - protein, 25 aa, Homo sapiens
MVSRKAVAALLVVHVAAMLASQTEA

SEQ ID NO: 208135 - protein, 28 aa, Homo sapiens
MLGNKRLGLSGLTLALSLLVCLGALAEA

SEQ ID NO: 208136 - protein, 27 aa, Homo sapiens
MITEGAQAPRLLLPPLLLLLTLPATGS

SEQ ID NO: 208137 - protein, 30 aa, Homo sapiens
MGTVSSRRSWWPLPLLLLLLLLLGPAGARA

SEQ ID NO: 208138 - protein, 35 aa, Homo sapiens
MGTVSSRRSWWPLPLLLLLLLLLGPAGARAQEDED

SEQ ID NO: 208139 - protein, 24 aa, Homo sapiens
MPRLFFFHLLGVCLLLNQFSRAVA

SEQ ID NO: 208140 - protein, 23 aa, Homo sapiens
MSRSLLLRFLLFLLLLPPLPVLL

SEQ ID NO: 208141 - protein, 22 aa, Homo sapiens
MATHHTLWMGLALLGVLGDLQA

SEQ ID NO: 208142 - protein, 20 aa, Homo sapiens
MKAVLLALLMAGLALQPGTA

SEQ ID NO: 208143 - protein, 17 aa, Homo sapiens
MWVPVVFLTLSVTWIGA

SEQ ID NO: 208144 - protein, 32 aa, Homo sapiens
MRAAPLLLARAASLSLGFLFLLFFWLDRSVLA

SEQ ID NO: 208145 - protein, 19 aa, Homo sapiens
MRSLGALLLLLSACLAVSA

SEQ ID NO: 208146 - protein, 21 aa, Homo sapiens
MWATQGLAVALALSVLPGSRA

SEQ ID NO: 208147 - protein, 31 aa, Homo sapiens
MAGLSRGSARALLAALLASTLLALLVSPARG

SEQ ID NO: 208148 - protein, 17 aa, Homo sapiens
MLRRALLCLAVAALVRA

SEQ ID NO: 208149 - protein, 24 aa, Homo sapiens
MRLRRLALFPGVALLLAAARLAAA

SEQ ID NO: 208150 - protein, 30 aa, Homo sapiens
MAGSRQRGLRARVRPLFCALLLSLGRFVRG

SEQ ID NO: 208151 - protein, 17 aa, Homo sapiens
MAVFLQLLPLLLSRAQG

SEQ ID NO: 208152 - protein, 21 aa, Homo sapiens
MESRVLLRTFCLIFGLGAVWG

SEQ ID NO: 208153 - protein, 31 aa, Homo sapiens
MQSVQSTSFCLRKQCLCLTFLLLHLLGQVAA

SEQ ID NO: 208154 - protein, 20 aa, Homo sapiens
MVYKTLFALCILTAGWRVQS

SEQ ID NO: 208155 - protein, 21 aa, Homo sapiens
MKVVPSLLLSVLLAQVWLVPG

SEQ ID NO: 208156 - protein, 22 aa, Homo sapiens
MASSIRRGRGAWTRLLSLLLLA

SEQ ID NO: 208157 - protein, 26 aa, Homo sapiens
MAVRELCFPRQRQVLFLFLFWGVSLA

SEQ ID NO: 208158 - protein, 41 aa, Homo sapiens
MANCQIAILYQRFQRVVFGISQLLCFSALISELTNQKEVAA

SEQ ID NO: 208159 - protein, 20 aa, Homo sapiens
MWLCPLALNLILMAASGAVC

SEQ ID NO: 208160 - protein, 20 aa, Homo sapiens
MWLCPLALNLILMAASGAAC

SEQ ID NO: 208161 - protein, 41 aa, Homo sapiens
MVGQMYCYPGSHLARALTRALALALVLALLVGPFLSGLAGA

SEQ ID NO: 208162 - protein, 19 aa, Homo sapiens
MRRLLEPCWWILFLKITSS

SEQ ID NO: 208163 - protein, 26 aa, Homo sapiens
MLPPMALPSVSWMLLSCLILLCQVQG

SEQ ID NO: 208164 - protein, 22 aa, Homo sapiens
MASRSMRLLLLLSCLAKTGVLG

SEQ ID NO: 208165 - protein, 25 aa, Homo sapiens
MARYMLLLLLAVWVLTGELWPGAEA

SEQ ID NO: 208166 - protein, 23 aa, Homo sapiens
MDGWRRMPRWGLLLLLWGSCTFG

SEQ ID NO: 208167 - protein, 26 aa, Homo sapiens
MELALRRSPVPRWLLLLPLLLGLNAG

SEQ ID NO: 208168 - protein, 18 aa, Homo sapiens
MKWVWALLLLAALGSGRA

SEQ ID NO: 208169 - protein, 28 aa, Homo sapiens
MALQRTHSLLLLLLLTLLGLGLVQPSYG

SEQ ID NO: 208170 - protein, 28 aa, Homo sapiens
MALEKSLVRLLLLVLILLVLGWVQPSLG

SEQ ID NO: 208171 - protein, 18 aa, Homo sapiens
MRPLLLLALLGWLLLAEA

SEQ ID NO: 208172 - protein, 16 aa, Homo sapiens
MLLILLSVALLAFSSA

SEQ ID NO: 208173 - protein, 28 aa, Homo sapiens
MGHHRPWLHASVLWAGVASLLLPPAMTQ

SEQ ID NO: 208174 - protein, 40 aa, Homo sapiens
MMLPQNSWHIDFGRCCCHQNLFSAVVTCILLLNSCFLISS

SEQ ID NO: 208175 - protein, 23 aa, Homo sapiens
MQLPLALCLVCLLVHTAFRVVEG

SEQ ID NO: 208176 - protein, 23 aa, Homo sapiens
MLPPAIHFYLLPLACILMKSCLA

SEQ ID NO: 208177 - protein, 20 aa, Homo sapiens
MKLMVLVFTIGLTLLLGVQA

SEQ ID NO: 208178 - protein, 31 aa, Homo sapiens
MGIGRSEGGRRGAALGVLLALGAALLAVGSA

SEQ ID NO: 208179 - protein, 24 aa, Homo sapiens
MLQGPGSLLLLFLASHCCLGSARG

SEQ ID NO: 208180 - protein, 32 aa, Homo sapiens
MVCGSPGGMLLLRAGLLALAALCLLRVPGARA

SEQ ID NO: 208181 - protein, 21 aa, Homo sapiens
MRLSVCLLMVSLALCCYQAHA

SEQ ID NO: 208182 - protein, 20 aa, Homo sapiens
MQPTLLLSLLGAVGLAAVNS

SEQ ID NO: 208183 - protein, 19 aa, Homo sapiens
MWRSLGLALALCLLPSGGT

SEQ ID NO: 208184 - protein, 38 aa, Homo sapiens
MGLRSWLAAPWGALPPRPPLLLLLLLLLLLQPPPPTWA

SEQ ID NO: 208185 - protein, 25 aa, Homo sapiens
MQTPRASPPRPALLLLLLLLGGAHG

SEQ ID NO: 208186 - protein, 23 aa, Artificial Sequence
  Description of Artificial Sequence: Synthetic Signal Sequence
MKPNIIFVLSLLLILEKQAAVMG

SEQ ID NO: 208187 - protein, 23 aa, Homo sapiens
MKSIILFVLSLLLILEKQAAVMG

SEQ ID NO: 208188 - protein, 27 aa, Homo sapiens
MMQKLLKCSRLVLALALILVLESSVQG

SEQ ID NO: 208189 - protein, 23 aa, Homo sapiens
MALSVLRLALLLLAVTFAASLIP

SEQ ID NO: 208190 - protein, 23 aa, Homo sapiens
MKLSGMFLLLSLALFCFLTGVFS

SEQ ID NO: 208191 - protein, 19 aa, Homo sapiens
MRLAVGALLVCAVLGLCLA

SEQ ID NO: 208192 - protein, 18 aa, Homo sapiens
MKWVTFISLLFLFSSAYS

SEQ ID NO: 208193 - protein, 18 aa, Homo sapiens
MKLLTGLVFCSLVLGVSS

SEQ ID NO: 208194 - protein, 18 aa, Homo sapiens
MRLFTGIVFCSLVMGVTS

SEQ ID NO: 208195 - protein, 19 aa, Homo sapiens
MNKPLLWISVLTSLLEAFA

SEQ ID NO: 208196 - protein, 29 aa, Homo sapiens
MESRGPLATSRLLLLLLLLLLRHTRQGWA

SEQ ID NO: 208197 - protein, 47 aa, Homo sapiens
MTGERPSTALPDRRWGPRILGFWGGCRVWVFAAIFLLLSLAASWSKA

SEQ ID NO: 208198 - protein, 18 aa, Homo sapiens
MFALGLPFLVLLVASVES

SEQ ID NO: 208199 - protein, 21 aa, Homo sapiens
MAQHHLWILLLCLQTWPEAAG

SEQ ID NO: 208200 - protein, 21 aa, Homo sapiens
MLWLFQSLLFVFCFGPGNVVS

SEQ ID NO: 208201 - protein, 22 aa, Homo sapiens
MAGSPTCLTLIYILWQLTGSAA

SEQ ID NO: 208202 - protein, 22 aa, Homo sapiens
MVMRPLWSLLLWEALLPITVTG

SEQ ID NO: 208203 - protein, 24 aa, Homo sapiens
MLSCRLQCALAALSIVLALGCVTG

SEQ ID NO: 208204 - protein, 26 aa, Homo sapiens
MATGSRTSLLLAFGLLCLPWLQEGSA

SEQ ID NO: 208205 - protein, 17 aa, Homo sapiens
MRAWIFFLLCLAGRALA

SEQ ID NO: 208206 - protein, 46 aa, Homo sapiens
MPRYGASLRQSCPRSGREQGQDGTAGAPGLLWMGLVLALALALALA

SEQ ID NO: 208207 - protein, 17 aa, Homo sapiens
MLQNSAVLLVLVISASA

SEQ ID NO: 208208 - protein, 19 aa, Homo sapiens
MKFLVFAFILALMVSMIGA

SEQ ID NO: 208209 - protein, 21 aa, Homo sapiens
MPLRKMKIPFLLLFFLWEAES

SEQ ID NO: 208210 - protein, 14 aa, Homo sapiens
MLVLGLLVAGAADG

SEQ ID NO: 208211 - protein, 22 aa, Artificial Sequence
  Description of Artificial Sequence: Synthetic Signal Sequence
MKSLTWILGLWALAACFTPGES

SEQ ID NO: 208212 - protein, 33 aa, Homo sapiens
MAAPALGLVCGRCPELGLVLLLLLLSLLCGAAG

SEQ ID NO: 208213 - protein, 19 aa, Homo sapiens
MGSGLPLVLLLTLLGSSHG

SEQ ID NO: 208214 - protein, 20 aa, Homo sapiens
MKSLSLLLAVALGLATAVSA

SEQ ID NO: 208215 - protein, 18 aa, Homo sapiens
MGTQEGWCLLLCLALSGA

SEQ ID NO: 208216 - protein, 21 aa, Homo sapiens
MDMWTALLILQALLLPSLADG

SEQ ID NO: 208217 - protein, 25 aa, Homo sapiens
MAGPPRLLLLPLLLALARGLPGALA

SEQ ID NO: 208218 - protein, 27 aa, Homo sapiens
MAMLLGASVLILWLQPDWVNSQQKNDD

SEQ ID NO: 208219 - protein, 20 aa, Homo sapiens
IFASLLRAVIASICVVSSMA

SEQ ID NO: 208220 - protein, 20 aa, Homo sapiens
MLLLLVPVLEVIFTLGGTRA

SEQ ID NO: 208221 - protein, 21 aa, Homo sapiens
MGTSLLCWMALCLLGADHADT

SEQ ID NO: 208222 - protein, 20 aa, Homo sapiens
MRWALLVLLAFLSPASQKSS

SEQ ID NO: 208223 - protein, 24 aa, Homo sapiens
MSFPCKFVASFLLIFNVSSKGAVS

SEQ ID NO: 208224 - protein, 16 aa, Homo sapiens
MLFLLLPLLAVLPGDG

SEQ ID NO: 208225 - protein, 19 aa, Homo sapiens
MLLLFLLFEGLCCPGENTA

SEQ ID NO: 208226 - protein, 21 aa, Homo sapiens
MEHSTFLSGLVLATLLSQVSP

SEQ ID NO: 208227 - protein, 22 aa, Homo sapiens
MQSGTHWRVLGLCLLSVGVWGQ

SEQ ID NO: 208228 - protein, 22 aa, Homo sapiens
MEQGKGLAVLILAIILLQGTLA

SEQ ID NO: 208229 - protein, 21 aa, Homo sapiens
MKWKALFTAAILQAQLPITEA

SEQ ID NO: 208230 - protein, 25 aa, Homo sapiens
MNRGVPFRHLLLVLQLALLPAATQG

SEQ ID NO: 208231 - protein, 24 aa, Homo sapiens
MPMGSLQPLATLYLLGMLVASCLG

SEQ ID NO: 208232 - protein, 21 aa, Homo sapiens
MRPRLWLLLAAQLTVLHGNSV

SEQ ID NO: 208233 - protein, 18 aa, Homo sapiens
MLRLLLALNLFPSIQVTG

SEQ ID NO: 208234 - protein, 22 aa, Homo sapiens
MGAMTQLLAGVFLAFLALATEG

SEQ ID NO: 208235 - protein, 30 aa, Homo sapiens
MDCRKMARFSYSVIWIMAISKVFELGLVAG

SEQ ID NO: 208236 - protein, 22 aa, Homo sapiens
MRAPGCGRLVLPLLLLAAAALA

SEQ ID NO: 208237 - protein, 21 aa, Homo sapiens
MELWGAYLLLCLFSLLTQVTT

SEQ ID NO: 208238 - protein, 22 aa, Homo sapiens
MGRGLLRGLWPLHIVLWTRIAS

SEQ ID NO: 208239 - protein, 26 aa, Homo sapiens
METRPRLGATCLLGFSFLLLVISSDG

SEQ ID NO: 208240 - protein, 29 aa, Homo sapiens
MHPAVFLSLPDLRCSLLLLVTWVFTPVTT

SEQ ID NO: 208241 - protein, 18 aa, Homo sapiens
MLGVLVLGALALAGLGFP

SEQ ID NO: 208242 - protein, 21 aa, Homo sapiens
MELTELLLVVMLLLTARLTLS

SEQ ID NO: 208243 - protein, 18 aa, Homo sapiens
MGLAWGLGVLFLMHVCGT

SEQ ID NO: 208244 - protein, 19 aa, Homo sapiens
MNLAISIALLLTVLQVSRG

SEQ ID NO: 208245 - protein, 19 aa, Homo sapiens
MALVLEIFTLLASICWVSA

SEQ ID NO: 208246 - protein, 20 aa, Homo sapiens
MRPADLLQLVLLLDLPRDLG

SEQ ID NO: 208247 - protein, 20 aa, Homo sapiens
MTALFLMSMLFGLACGQAMS

SEQ ID NO: 208248 - protein, 20 aa, Homo sapiens
MSPFLYLVLLVLGLHATIHC

SEQ ID NO: 208249 - protein, 32 aa, Homo sapiens
METPAWPRVPRPETAVARTLLLGWVFAQVAGA

SEQ ID NO: 208250 - protein, 28 aa, Homo sapiens
MIYTMKKVHALWASVCLLLNLAPAPLNA

SEQ ID NO: 208251 - protein, 22 aa, Homo sapiens
MDPARPLGLSILLLFLTEAALG

SEQ ID NO: 208252 - protein, 22 aa, Homo sapiens
MDAMKRGLCCVLLLCGAVFVSP

SEQ ID NO: 208253 - protein, 34 aa, Homo sapiens
MGHTRRQGTSPSKCPYLNFFQLLVLAGLSHFCSG

SEQ ID NO: 208254 - protein, 37 aa, Homo sapiens
MAAAWPSGPSAPEAVTARLVGVLWFVSVTTGPWGAVA

SEQ ID NO: 208255 - protein, 24 aa, Homo sapiens
MTSIFHFAIIFMLILQIRIQLSEE

SEQ ID NO: 208256 - protein, 23 aa, Homo sapiens
MRQTLPCIYFWGGLLPFGMLCAS

SEQ ID NO: 208257 - protein, 23 aa, Homo sapiens
MMSASRLAGTLIPAMAFLSCVRP

SEQ ID NO: 208258 - protein, 20 aa, Homo sapiens
MGDHLDLLLGVVLMAGPVFG

SEQ ID NO: 208259 - protein, 40 aa, Homo sapiens
MVLWESPRQCSSWTLCEGFCWLLLLPVMLLIVARPVKLAA

SEQ ID NO: 208260 - protein, 23 aa, Homo sapiens
MRQSHQLPLVGLLLFSFIPSQLC

SEQ ID NO: 208261 - protein, 18 aa, Homo sapiens
MRHLGAFLFLLGVLGALT

SEQ ID NO: 208262 - protein, 29 aa, Homo sapiens
MPPSGLRLLLLLLPLLWLLVLTPGRPAAG

SEQ ID NO: 208263 - protein, 18 aa, Homo sapiens
MRLLPRLLLLLLLVFPAT

SEQ ID NO: 208264 - protein, 22 aa, Homo sapiens
MGSPGMVLGLLVQIWALQEASS

SEQ ID NO: 208265 - protein, 26 aa, Homo sapiens
MALPPGPAALRHTLLLLPALLSSGWG

SEQ ID NO: 208266 - protein, 33 aa, Homo sapiens
MWGARRSSVSSSWNAASLLQLLLAALLAAGARA

SEQ ID NO: 208267 - protein, 30 aa, Homo sapiens
MAAACGPGAAGYCLLLGLHLFLLTAGPALG

SEQ ID NO: 208268 - protein, 33 aa, Homo sapiens
MATLWGGLLRLGSLLSLSCLALSVLLLAQLSDA

SEQ ID NO: 208269 - protein, 20 aa, Homo sapiens
MASHRLLLLCLAGLVFVSEA

SEQ ID NO: 208270 - protein, 24 aa, Homo sapiens
MATMENKVICALVLVSMLALGTLA

SEQ ID NO: 208271 - protein, 21 aa, Homo sapiens
MAARALCMLGLVLALLSSSSA

SEQ ID NO: 208272 - protein, 19 aa, Homo sapiens
MGLQACLLGLFALILSGKC

SEQ ID NO: 208273 - protein, 15 aa, Homo sapiens
MNPLLILTFVAAALA

SEQ ID NO: 208274 - protein, 15 aa, Homo sapiens
MNLLLILTFVAAAVA

SEQ ID NO: 208275 - protein, 21 aa, Homo sapiens
MWRCPLGLLLLLPLAGHLALG

SEQ ID NO: 208276 - protein, 55 aa, Homo sapiens
MEQRGQNAPAASGARKRHGPGPREARGARPGPRVPKTLVLVVAAVLLLVSAESAL

SEQ ID NO: 208277 - protein, 23 aa, Homo sapiens
MARIPKTLKFVVVIVAVLLPVLA

SEQ ID NO: 208278 - protein, 55 aa, Homo sapiens
MGLWGQSVPTASSARAGRYPGARTASGTRPWLLDPKILKFVVFIVAVLLPVRVDS

SEQ ID NO: 208279 - protein, 21 aa, Homo sapiens
MNKLLCCALVFLDISIKWTTQ

SEQ ID NO: 208280 - protein, 38 aa, Homo sapiens
MEPPGDWGPPPWRSTPKTDVLRLVLYLTFLGAPCYAPA

SEQ ID NO: 208281 - protein, 28 aa, Homo sapiens
MGAGATGRAMDGPRLLLLLLLGVSLGGA

SEQ ID NO: 208282 - protein, 25 aa, Homo sapiens
MAQHGAMGAFRALCGLALLCALSLG

SEQ ID NO: 208283 - protein, 29 aa, Homo sapiens
MALKVLLEQEKTFFTLLVLLGYLSCKVTC

SEQ ID NO: 208284 - protein, 25 aa, Artificial Sequence
  Description of Artificial Sequence: Synthetic Signal Sequence
MKPSLLCRPLSCFLMLLPWPLATLT

SEQ ID NO: 208285 - protein, 21 aa, Homo sapiens
MGLSTVPDLLLPLVLLELLVG

SEQ ID NO: 208286 - protein, 22 aa, Homo sapiens
MAPVAVWAALAVGLELWAAAHA

SEQ ID NO: 208287 - protein, 20 aa, Homo sapiens
MVRLPLQCVLWGCLLTAVHP

SEQ ID NO: 208288 - protein, 29 aa, Homo sapiens
MRALEGPGLSLLCLVLALPALLPVPAVRG

SEQ ID NO: 208289 - protein, 18 aa, Homo sapiens
MRVLLAALGLLFLGALRA

SEQ ID NO: 208290 - protein, 23 aa, Homo sapiens
MGNSCYNIVATLLLVLNFERTRS

SEQ ID NO: 208291 - protein, 26 aa, Homo sapiens
MAHVGDCTQTPWLPVLVVSLMCSARA

SEQ ID NO: 208292 - protein, 17 aa, Homo sapiens
MIILIYLFLLLWEDTQG

SEQ ID NO: 208293 - protein, 21 aa, Homo sapiens
MVWRVPPFLLPILFLASHVGA

SEQ ID NO: 208294 - protein, 23 aa, Homo sapiens
MDSLRKMLISVAMLGAGAGVGYA

SEQ ID NO: 208295 - protein, 22 aa, Homo sapiens
MGHPPLLPLLLLLHTCVPASWG

SEQ ID NO: 208296 - protein, 20 aa, Homo sapiens
MRALLARLLLCVLVVSDSKG

SEQ ID NO: 208297 - protein, 24 aa, Homo sapiens
MGQPSLTWMLMVVVASWFITTAAT

SEQ ID NO: 208298 - protein, 20 aa, Homo sapiens
MYKLASCCLLFIGFLNPLLS

SEQ ID NO: 208299 - protein, 21 aa, Homo sapiens
MKLAVTLTLVTLALCCSSASA

SEQ ID NO: 208300 - protein, 37 aa, Homo sapiens
MVAVLGGRGVLRLRLLLSALKPGIHVPRAGPAAAFGT

SEQ ID NO: 208301 - protein, 24 aa, Homo sapiens
MPGKMVVILGASNILWIMFAASQA

SEQ ID NO: 208302 - protein, 26 aa, Homo sapiens
MNFLLSWVHWSLALLLYLHHAKWSQA

SEQ ID NO: 208303 - protein, 31 aa, Homo sapiens
MHLLGFFSVACSLLAAALLPGPREAPAAAAA

SEQ ID NO: 208304 - protein, 26 aa, Homo sapiens
MVSYWDTGVLLCALLSCLLLTGSSSG

SEQ ID NO: 208305 - protein, 24 aa, Homo sapiens
MQRGAALCLRLWLCLGLLDGLVSG

SEQ ID NO: 208306 - protein, 19 aa, Homo sapiens
MPDTMLPACFLGLLAFSSA

SEQ ID NO: 208307 - protein, 21 aa, Homo sapiens
MKVLISSLLLLLPLMLMSMVS

SEQ ID NO: 208308 - protein, 20 aa, Homo sapiens
MFINIKSILWMCSTLIVTHA

SEQ ID NO: 208309 - protein, 16 aa, Homo sapiens
MKRVLVLLLAVAFGHA

SEQ ID NO: 208310 - protein, 32 aa, Homo sapiens
MWQLTSLLLFVATWGISGTPAPLDSVFSSSER

SEQ ID NO: 208311 - protein, 24 aa, Homo sapiens
MRVLGGRCGALLACLLLVLPVSEA

SEQ ID NO: 208312 - protein, 23 aa, Homo sapiens
MAGCVPLLQGLVLVLALHRVEPS

SEQ ID NO: 208313 - protein, 24 aa, Homo sapiens
MERGAGAKLLPLLLLLRATGFTCA

SEQ ID NO: 208314 - protein, 19 aa, Homo sapiens
MAPLRPLLILALLAWVALA

SEQ ID NO: 208315 - protein, 22 aa, Homo sapiens
MIPARFAGVLLALALILPGTLC

SEQ ID NO: 208316 - protein, 23 aa, Homo sapiens
MAELPGPFLCGALLGFLCLSGLA

SEQ ID NO: 208317 - protein, 19 aa, Homo sapiens
MGILLGLLLLGHLTVDTYG

SEQ ID NO: 208318 - protein, 16 aa, Artificial Sequence
  Description of Artificial Sequence: Synthetic Signal Sequence
MTAEFLSLLCLGLCLG

SEQ ID NO: 208319 - protein, 23 aa, Homo sapiens
MRGTPKTHLLAFSLLCLLSKVRT

SEQ ID NO: 208320 - protein, 28 aa, Homo sapiens
MARKLSVILILTFALSVTNPLHELKAAA

SEQ ID NO: 208321 - protein, 17 aa, Homo sapiens
MVPVLLSLLLLLGPAVP

SEQ ID NO: 208322 - protein, 38 aa, Homo sapiens
MACRQRGGSWSPSGWFNAGWSTYRSISLFFALVTSGNS

SEQ ID NO: 208323 - protein, 16 aa, Homo sapiens
MLTVALLALLCASASG

SEQ ID NO: 208324 - protein, 9 aa, Homo sapiens
SARNRQKRS

SEQ ID NO: 208325 - DNA, 27 bp, Homo sapiens
agcgccaggaatcgccagaagcggtcc

SEQ ID NO: 208326 - protein, 8 aa, Homo sapiens
ARNRQKRS

SEQ ID NO: 208327 - DNA, 24 bp, Homo sapiens
gcccggaatagacagaagagatct

SEQ ID NO: 208328 - protein, 12 aa, Artificial Sequence
  Description of Artificial Sequence: Synthetic Cleavage site sequence
ESRRVRRNKRSK

SEQ ID NO: 208329 - DNA, 36 bp, Artificial Sequence
  Description of Artificial Sequence: Synthetic Cleavage site sequence
gagtctaggcgcgtgcggagaaataagcggagcaag

SEQ ID NO: 208330 - DNA, 36 bp, Artificial Sequence
  Description of Artificial Sequence: Synthetic Cleavage site sequence
gagtctcggagagtgaggcgcaataagaggagcaag

SEQ ID NO: 208331 - DNA, 36 bp, Artificial Sequence
  Description of Artificial Sequence: Synthetic Cleavage site sequence
gagtccaggagagtgcggcgcaacaagaggagcaag

SEQ ID NO: 208332 - DNA, 36 bp, Artificial Sequence
  Description of Artificial Sequence: Synthetic Cleavage site sequence
gagtccaggagagtgcggcgcaacaagcggtctaag

SEQ ID NO: 208333 - DNA, 36 bp, Artificial Sequence
  Description of Artificial Sequence: Synthetic Cleavage site sequence
gagtctcggcgcgtgaggagaaataagagaagcaag

SEQ ID NO: 208334 - DNA, 36 bp, Artificial Sequence
  Description of Artificial Sequence: Synthetic Cleavage site sequence
gagtctaggagagtgcggcgcaataagagaagcaag

SEQ ID NO: 208335 - protein, 14 aa, Artificial Sequence
  Description of Artificial Sequence: Synthetic Cleavage site sequence
SGESRRVRRNKRSK

SEQ ID NO: 208336 - DNA, 42 bp, Artificial Sequence
  Description of Artificial Sequence: Synthetic Cleavage site sequence
agtggtgagtccaggagagtgcggcgcaacaagaggagcaag

SEQ ID NO: 208337 - protein, 19 aa, Artificial Sequence
  Description of Artificial Sequence: Synthetic Cleavage site sequence
ATNFSLLKQAGDVEENPGP

SEQ ID NO: 208338 - DNA, 57 bp, Artificial Sequence
  Description of Artificial Sequence: Synthetic Cleavage site sequence
gctactaacttcagcctgctgaagcaggctggagacgtggaggagaaccctggacct

SEQ ID NO: 208339 - DNA, 57 bp, Artificial Sequence
  Description of Artificial Sequence: Synthetic Cleavage site sequence
gcaaccaattttagtctacttaaacaagcaggtgatgtagaagaaaatccaggtcca

SEQ ID NO: 208340 - protein, 20 aa, Artificial Sequence
  Description of Artificial Sequence: Synthetic Cleavage site sequence
GATNFSLLKQAGDVEENPGP

SEQ ID NO: 208341 - DNA, 60 bp, Artificial Sequence
  Description of Artificial Sequence: Synthetic Cleavage site sequence
ggagctactaacttcagcctgctgaagcaggctggagacgtggaggagaaccctggacct

SEQ ID NO: 208342 - protein, 5 aa, Unknown
  Description of Unknown: Granzyme B sequence
  MOD_RES (5)..(5): Any amino acid
IEPDX

SEQ ID NO: 208343 - protein, 5 aa, Unknown
  Description of Unknown: Enterokinase sequence
DDDDK

SEQ ID NO: 208344 - protein, 6 aa, Unknown
  Description of Unknown: Genenase sequence
PGAAHY

SEQ ID NO: 208345 - protein, 7 aa, Unknown
  Description of Unknown: PreScission protease sequence
LEVFQGP

SEQ ID NO: 208346 - protein, 6 aa, Unknown
  Description of Unknown: Thrombin sequence
LVPRGS

SEQ ID NO: 208347 - protein, 7 aa, Unknown
  Description of Unknown: TEV protease sequence
ENLYFQG

SEQ ID NO: 208348 - protein, 4 aa, Artificial Sequence
  Description of Artificial Sequence: Synthetic peptide
RTKR

SEQ ID NO: 208349 - DNA, 12 bp, Artificial Sequence
  Description of Artificial Sequence: Synthetic Cleavage site sequence
agaacgaagaga

SEQ ID NO: 208350 - protein, 20 aa, Artificial Sequence
  Description of Artificial Sequence: Synthetic peptide
GTGAEDPRPSRKRRSLGDVG

SEQ ID NO: 208351 - protein, 14 aa, Artificial Sequence
  Description of Artificial Sequence: Synthetic peptide
GTGAEDPRPSRKRR

SEQ ID NO: 208352 - protein, 15 aa, Artificial Sequence
  Description of Artificial Sequence: Synthetic peptide
LQWLEQQVAKRRTKR

SEQ ID NO: 208353 - protein, 18 aa, Artificial Sequence
  Description of Artificial Sequence: Synthetic peptide
GTGAEDPRPSRKRRSLGG

SEQ ID NO: 208354 - protein, 17 aa, Artificial Sequence
  Description of Artificial Sequence: Synthetic peptide
GTGAEDPRPSRKRRSLG

SEQ ID NO: 208355 - protein, 14 aa, Artificial Sequence
  Description of Artificial Sequence: Synthetic peptide
SLNLTESHNSRKKR

SEQ ID NO: 208356 - protein, 14 aa, Artificial Sequence
  Description of Artificial Sequence: Synthetic peptide
CKINGYPKRGRKRR

SEQ ID NO: 208357 - protein, 4 aa, Artificial Sequence
  Description of Artificial Sequence: Synthetic peptide
RGDS

SEQ ID NO: 208358 - protein, 8 aa, Artificial Sequence
  Description of Artificial Sequence: Synthetic peptide
SARNRRKR

SEQ ID NO: 208359 - protein, 21 aa, Artificial Sequence
  Description of Artificial Sequence: Synthetic peptide
GSGEGRGSLLTCGDVEENPGP

SEQ ID NO: 208360 - protein, 22 aa, Artificial Sequence
  Description of Artificial Sequence: Synthetic peptide
GSGATNFSLLKQAGDVEENPGP

SEQ ID NO: 208361 - protein, 23 aa, Artificial Sequence
  Description of Artificial Sequence: Synthetic peptide
GSGQCTNYALLKLAGDVESNPGP

SEQ ID NO: 208362 - protein, 25 aa, Artificial Sequence
  Description of Artificial Sequence: Synthetic peptide
GSGVKQTLNFDLLKLAGDVESNPGP

SEQ ID NO: 208363 - protein, 4 aa, Artificial Sequence
  Description of Artificial Sequence: Synthetic Linker
GGGG

SEQ ID NO: 208364 - protein, 6 aa, Artificial Sequence
  Description of Artificial Sequence: Synthetic Linker
GGGGGG

SEQ ID NO: 208365 - protein, 8 aa, Artificial Sequence
  Description of Artificial Sequence: Synthetic Linker
GGGGGGGG

SEQ ID NO: 208366 - protein, 4 aa, Artificial Sequence
  Description of Artificial Sequence: Synthetic Linker
GGGS

SEQ ID NO: 208367 - protein, 5 aa, Artificial Sequence
  Description of Artificial Sequence: Synthetic Linker
GGGGS

SEQ ID NO: 208368 - protein, 10 aa, Artificial Sequence
  Description of Artificial Sequence: Synthetic Linker
GGGGSGGGGS

SEQ ID NO: 208369 - protein, 15 aa, Artificial Sequence
  Description of Artificial Sequence: Synthetic Linker
GGGGSGGGGSGGGGS

SEQ ID NO: 208370 - DNA, 45 bp, Artificial Sequence
  Description of Artificial Sequence: Synthetic Linker
ggaggaggaggatccggaggaggaggatctggcggcggcggcagc

SEQ ID NO: 208371 - DNA, 45 bp, Artificial Sequence
  Description of Artificial Sequence: Synthetic Linker
ggaggaggaggatccggaggaggaggatctggcggaggaggcagc

SEQ ID NO: 208372 - DNA, 45 bp, Artificial Sequence
  Description of Artificial Sequence: Synthetic Linker
ggaggaggaggaagcggaggaggaggatccggcggaggaggctct

SEQ ID NO: 208373 - DNA, 45 bp, Artificial Sequence
  Description of Artificial Sequence: Synthetic Linker
ggaggaggaggcagcggaggaggaggttctggaggaggcggcagc

SEQ ID NO: 208374 - DNA, 45 bp, Artificial Sequence
  Description of Artificial Sequence: Synthetic Linker
ggcggcggcggctctggaggaggaggcagcggcggaggaggctcc

SEQ ID NO: 208375 - DNA, 45 bp, Artificial Sequence
  Description of Artificial Sequence: Synthetic Linker
ggaggaggaggcagcggcggaggaggctccggcggcggcggctct

SEQ ID NO: 208376 - protein, 20 aa, Artificial Sequence
  Description of Artificial Sequence: Synthetic Linker
GGGGSGGGGSGGGGSGGGGS

SEQ ID NO: 208377 - protein, 36 aa, Artificial Sequence
  Description of Artificial Sequence: Synthetic Linker
GGSGGGSEGGGSEGGGSEGGGSEGGGSEGGGSGGGS

SEQ ID NO: 208378 - protein, 5 aa, Artificial Sequence
  Description of Artificial Sequence: Synthetic Linker
SSSSG

SEQ ID NO: 208379 - protein, 10 aa, Artificial Sequence
  Description of Artificial Sequence: Synthetic Linker
SSSSGSSSSG

SEQ ID NO: 208380 - protein, 13 aa, Artificial Sequence
  Description of Artificial Sequence: Synthetic Linker
SGSSSSGSSSSGS

SEQ ID NO: 208381 - protein, 15 aa, Artificial Sequence
  Description of Artificial Sequence: Synthetic Linker
SSSSGSSSSGSSSSG

SEQ ID NO: 208382 - protein, 19 aa, Artificial Sequence
  Description of Artificial Sequence: Synthetic Linker
SVTVSSSGSSSSGSSSSGS

SEQ ID NO: 208383 - protein, 20 aa, Artificial Sequence
  Description of Artificial Sequence: Synthetic Linker
SSSSGSSSSGSSSSGSSSSG

SEQ ID NO: 208384 - protein, 25 aa, Artificial Sequence
  Description of Artificial Sequence: Synthetic Linker
SSSSGSSSSGSSSSGSSSSGSSSSG

SEQ ID NO: 208385 - protein, 6 aa, Artificial Sequence
  Description of Artificial Sequence: Synthetic Linker
EFSTEF

SEQ ID NO: 208386 - DNA, 18 bp, Artificial Sequence
  Description of Artificial Sequence: Synthetic Linker
gagttctccaccgagttc

SEQ ID NO: 208387 - DNA, 18 bp, Artificial Sequence
  Description of Artificial Sequence: Synthetic Linker
gagttcagcaccgagttt

SEQ ID NO: 208388 - protein, 5 aa, Artificial Sequence
  Description of Artificial Sequence: Synthetic Linker
GGSGG

SEQ ID NO: 208389 - DNA, 15 bp, Artificial Sequence
  Description of Artificial Sequence: Synthetic Linker
ggaggcagcggagga

SEQ ID NO: 208390 - DNA, 15 bp, Artificial Sequence
  Description of Artificial Sequence: Synthetic Linker
ggaggctctggagga

SEQ ID NO: 208391 - DNA, 15 bp, Artificial Sequence
  Description of Artificial Sequence: Synthetic Linker
ggaggctccggcgga

SEQ ID NO: 208392 - DNA, 15 bp, Artificial Sequence
  Description of Artificial Sequence: Synthetic Linker
ggaggatccggaggc

SEQ ID NO: 208393 - DNA, 15 bp, Artificial Sequence
  Description of Artificial Sequence: Synthetic Linker
ggaggatctggagga

SEQ ID NO: 208394 - DNA, 15 bp, Artificial Sequence
  Description of Artificial Sequence: Synthetic Linker
ggtggatccggagga

SEQ ID NO: 208395 - protein, 4 aa, Artificial Sequence
  Description of Artificial Sequence: Synthetic Linker
GGSG

SEQ ID NO: 208396 - DNA, 12 bp, Artificial Sequence
  Description of Artificial Sequence: Synthetic Linker
ggaggatctgga

SEQ ID NO: 208397 - DNA, 12 bp, Artificial Sequence
  Description of Artificial Sequence: Synthetic Linker
ggtggatccgga

SEQ ID NO: 208398 - DNA, 18 bp, Artificial Sequence
  Description of Artificial Sequence: Synthetic Linker
ggtggctctggtggtggt

SEQ ID NO: 208399 - DNA, 18 bp, Artificial Sequence
  Description of Artificial Sequence: Synthetic Linker
ggaggtagtggtggaggc

SEQ ID NO: 208400 - protein, 6 aa, Artificial Sequence
  Description of Artificial Sequence: Synthetic Linker
GGSGGG

SEQ ID NO: 208401 - protein, 26 aa, Artificial Sequence
  Description of Artificial Sequence: Synthetic Linker
SGGGSGGGGSGGGGSGGGGSGGGSLQ

SEQ ID NO: 208402 - DNA, 78 bp, Artificial Sequence
  Description of Artificial Sequence: Synthetic Linker
tcaggtggcggtagtggtgggggaggatctggaggcggaggaagcgggggtggaggttcaggaggagggagcttgcaa

SEQ ID NO: 208403 - DNA, 78 bp, Artificial Sequence
  Description of Artificial Sequence: Synthetic Linker
tcaggtggcggtagtggtgggggaggatctggaggcggaggaagcgggggtggaggttcaggtggaggcagcttgcaa

SEQ ID NO: 208404 - DNA, 78 bp, Artificial Sequence
  Description of Artificial Sequence: Synthetic Linker
tccggtggaggtagcggtggagggggttctggtggaggaggttctggaggtggaggttctggcggtgggtccttgcaa

SEQ ID NO: 208405 - DNA, 78 bp, Artificial Sequence
  Description of Artificial Sequence: Synthetic Linker
tctggcggaggaagcggaggcggaggatctggtggtggtggatctggcggcggtggtagtggcggaggttctctgcaa

SEQ ID NO: 208406 - DNA, 78 bp, Artificial Sequence
  Description of Artificial Sequence: Synthetic Linker
tccggggggggtagcgggggagggggttccggcgggggagggtctggagggggaggttccggcggggggtccttgcaa

SEQ ID NO: 208407 - DNA, 78 bp, Artificial Sequence
  Description of Artificial Sequence: Synthetic Linker
tctggcggaggatctggaggaggcggatctggaggaggaggcagtggaggcggaggatctggcggaggatctctgcag

SEQ ID NO: 208408 - protein, 5 aa, Artificial Sequence
  Description of Artificial Sequence: Synthetic Linker
SGGGS

SEQ ID NO: 208409 - DNA, 15 bp, Artificial Sequence
  Description of Artificial Sequence: Synthetic Linker
tcaggtggcggtagt

SEQ ID NO: 208410 - DNA, 15 bp, Artificial Sequence
  Description of Artificial Sequence: Synthetic Linker
agcggcggtggcagc

SEQ ID NO: 208411 - DNA, 15 bp, Artificial Sequence
  Description of Artificial Sequence: Synthetic Linker
tcaggcggggggagt

SEQ ID NO: 208412 - protein, 20 aa, Artificial Sequence
  Description of Artificial Sequence: Synthetic Linker
SGGGSGGGGSGGGGSGGGGS

SEQ ID NO: 208413 - DNA, 60 bp, Artificial Sequence
  Description of Artificial Sequence: Synthetic Linker
agtggtggcgggtccggcggtggtggtagcgggggtggaggctcaggtggcggtggcagt

SEQ ID NO: 208414 - protein, 9 aa, Artificial Sequence
  Description of Artificial Sequence: Synthetic Linker
GGSGGGSGG

SEQ ID NO: 208415 - DNA, 27 bp, Artificial Sequence
  Description of Artificial Sequence: Synthetic Linker
ggaggtagtggtggaggcagtggtgga

SEQ ID NO: 208416 - protein, 5 aa, Artificial Sequence
  Description of Artificial Sequence: Synthetic Linker
GGGGG

SEQ ID NO: 208417 - protein, 25 aa, Artificial Sequence
  Description of Artificial Sequence: Synthetic Linker
GGGGSGGGGSGGGGSGGGGSGGGGS

SEQ ID NO: 208418 - protein, 30 aa, Artificial Sequence
  Description of Artificial Sequence: Synthetic Linker
GGGGSGGGGSGGGGSGGGGSGGGGSGGGGS

SEQ ID NO: 208419 - protein, 10 aa, Artificial Sequence
  Description of Artificial Sequence: Synthetic Linker
SSSSGSSSSG

SEQ ID NO: 208420 - protein, 30 aa, Artificial Sequence
  Description of Artificial Sequence: Synthetic Linker
SSSSGSSSSGSSSSGSSSSGSSSSGSSSSG

SEQ ID NO: 208421 - protein, 34 aa, Artificial Sequence
  Description of Artificial Sequence: Synthetic Linker
SGGGSGGGGSGGGGSGGGGSGGGGSGGGGSGGGS

SEQ ID NO: 208422 - DNA, 102 bp, Artificial Sequence
  Description of Artificial Sequence: Synthetic Linker
tctggtggcgggagtggaggaggtgggtccggagggggagggagcggtggtggaggttccggcggggggggtagtggaggcggagggtcaggtgggggcagc

SEQ ID NO: 208423 - protein, 36 aa, Artificial Sequence
  Description of Artificial Sequence: Synthetic Linker
GGSAGGSGSGSSGGSSGASGTGTAGGTGSGSGTGSG

SEQ ID NO: 208424 - protein, 5 aa, Artificial Sequence
  Description of Artificial Sequence: Synthetic Linker
PAPAP

SEQ ID NO: 208425 - protein, 10 aa, Artificial Sequence
  Description of Artificial Sequence: Synthetic Linker
APAPAPAPAP

SEQ ID NO: 208426 - protein, 12 aa, Artificial Sequence
  Description of Artificial Sequence: Synthetic Linker
APAPAPAPAPAP

SEQ ID NO: 208427 - protein, 14 aa, Artificial Sequence
  Description of Artificial Sequence: Synthetic Linker
APAPAPAPAPAPAP

SEQ ID NO: 208428 - protein, 16 aa, Artificial Sequence
  Description of Artificial Sequence: Synthetic Linker
APAPAPAPAPAPAPAP

SEQ ID NO: 208429 - protein, 18 aa, Artificial Sequence
  Description of Artificial Sequence: Synthetic Linker
APAPAPAPAPAPAPAPAP

SEQ ID NO: 208430 - protein, 20 aa, Artificial Sequence
  Description of Artificial Sequence: Synthetic Linker
APAPAPAPAPAPAPAPAPAP

SEQ ID NO: 208431 - protein, 22 aa, Artificial Sequence
  Description of Artificial Sequence: Synthetic Linker
APAPAPAPAPAPAPAPAPAPAP

SEQ ID NO: 208432 - protein, 24 aa, Artificial Sequence
  Description of Artificial Sequence: Synthetic Linker
APAPAPAPAPAPAPAPAPAPAPAP

SEQ ID NO: 208433 - protein, 26 aa, Artificial Sequence
  Description of Artificial Sequence: Synthetic Linker
APAPAPAPAPAPAPAPAPAPAPAPAP

SEQ ID NO: 208434 - protein, 28 aa, Artificial Sequence
  Description of Artificial Sequence: Synthetic Linker
APAPAPAPAPAPAPAPAPAPAPAPAPAP

SEQ ID NO: 208435 - protein, 30 aa, Artificial Sequence
  Description of Artificial Sequence: Synthetic Linker
APAPAPAPAPAPAPAPAPAPAPAPAPAPAP

SEQ ID NO: 208436 - protein, 32 aa, Artificial Sequence
  Description of Artificial Sequence: Synthetic Linker
APAPAPAPAPAPAPAPAPAPAPAPAPAPAPAP

SEQ ID NO: 208437 - protein, 33 aa, Artificial Sequence
  Description of Artificial Sequence: Synthetic Linker
EPEPEPEPIPEPPKEAPVVIEKPKPKPKPKPKP

SEQ ID NO: 208438 - protein, 34 aa, Artificial Sequence
  Description of Artificial Sequence: Synthetic Linker
APAPAPAPAPAPAPAPAPAPAPAPAPAPAPAPAP

SEQ ID NO: 208439 - protein, 5 aa, Artificial Sequence
  Description of Artificial Sequence: Synthetic Linker
EAAAK

SEQ ID NO: 208440 - protein, 10 aa, Artificial Sequence
  Description of Artificial Sequence: Synthetic Linker
EAAAKEAAAK

SEQ ID NO: 208441 - protein, 12 aa, Artificial Sequence
  Description of Artificial Sequence: Synthetic Linker
AEAAAKEAAAKA

SEQ ID NO: 208442 - protein, 15 aa, Artificial Sequence
  Description of Artificial Sequence: Synthetic Linker
EAAAKEAAAKEAAAK

SEQ ID NO: 208443 - protein, 17 aa, Artificial Sequence
  Description of Artificial Sequence: Synthetic Linker
AEAAAKEAAAKEAAAKA

SEQ ID NO: 208444 - protein, 22 aa, Artificial Sequence
  Description of Artificial Sequence: Synthetic Linker
AEAAAKEAAAKEAAAKEAAAKA

SEQ ID NO: 208445 - protein, 27 aa, Artificial Sequence
  Description of Artificial Sequence: Synthetic Linker
AEAAAKEAAAKEAAAKEAAAKEAAAKA

SEQ ID NO: 208446 - protein, 46 aa, Artificial Sequence
  Description of Artificial Sequence: Synthetic Linker
AEAAAKEAAAKEAAAKEAAAKALEAEAAAKEAAAKEAAAKEAAAKA

SEQ ID NO: 208447 - protein, 12 aa, Artificial Sequence
  Description of Artificial Sequence: Synthetic Linker
GKSSGSGSESKS

SEQ ID NO: 208448 - protein, 15 aa, Artificial Sequence
  Description of Artificial Sequence: Synthetic Linker
GGSTSGSGKSSEGKG

SEQ ID NO: 208449 - protein, 19 aa, Artificial Sequence
  Description of Artificial Sequence: Synthetic Linker
GSTSGSGKSSSEGSGSTKG

SEQ ID NO: 208450 - protein, 13 aa, Artificial Sequence
  Description of Artificial Sequence: Synthetic Linker
VDYPYDVPDYALD

SEQ ID NO: 208451 - DNA, 39 bp, Artificial Sequence
  Description of Artificial Sequence: Synthetic Linker
gtcgactatccctacgatgttccggactacgcactggac

SEQ ID NO: 208452 - protein, 14 aa, Artificial Sequence
  Description of Artificial Sequence: Synthetic Linker
EGKSSGSGSESKEF

SEQ ID NO: 208453 - protein, 35 aa, Artificial Sequence
  Description of Artificial Sequence: Synthetic Linker
SGGGSGGGGSGGGGSGGGGSGGGSLQYPYDVPDYA

SEQ ID NO: 208454 - DNA, 105 bp, Artificial Sequence
  Description of Artificial Sequence: Synthetic Linker
tcaggtggcggtagtggtgggggaggatctggaggcggaggaagcgggggtggaggttcaggtggaggcagcttgcaatacccatacgatgttccagattacgct

SEQ ID NO: 208455 - protein, 8 aa, Artificial Sequence
  Description of Artificial Sequence: Synthetic Linker
DYKDDDDK

SEQ ID NO: 208456 - DNA, 24 bp, Artificial Sequence
  Description of Artificial Sequence: Synthetic Linker
gactacaaagacgatgacgacaag

SEQ ID NO: 208457 - protein, 34 aa, Artificial Sequence
  Description of Artificial Sequence: Synthetic Linker
SGGGSGGGGSGGGGSGGGGSYPYDVPDYASGGGS

SEQ ID NO: 208458 - DNA, 102 bp, Artificial Sequence
  Description of Artificial Sequence: Synthetic Linker
agtggtggcgggtccggcggtggtggtagcgggggtggaggctcaggtggcggtggcagttatccttacgatgtgcccgactatgcttcaggcggggggagt

SEQ ID NO: 208459 - protein, 22 aa, Artificial Sequence
  Description of Artificial Sequence: Synthetic Linker
GSGATNFSLLKQAGDVEENPGP

SEQ ID NO: 208460 - DNA, 66 bp, Artificial Sequence
  Description of Artificial Sequence: Synthetic Linker
ggttcaggagctactaacttcagcctgctgaagcaggctggagacgtggaggagaaccctggacct

SEQ ID NO: 208461 - protein, 8 aa, Artificial Sequence
  Description of Artificial Sequence: Synthetic Linker
  MOD_RES (4)..(4): Any amino acid
DVEXNPGP

SEQ ID NO: 208462 - protein, 8 aa, Artificial Sequence
  Description of Artificial Sequence: Synthetic Linker
  MOD_RES (4)..(4): Any amino acid
DIEXNPGP

SEQ ID NO: 208463 - protein, 22 aa, Artificial Sequence
  Description of Artificial Sequence: Synthetic Linker
SGGGGSGGGGSGGGGSGGGSLQ

SEQ ID NO: 208464 - protein, 13 aa, Artificial Sequence
  Description of Artificial Sequence: Synthetic Linker
QLIGMLQGLMRDL

SEQ ID NO: 208465 - DNA, 39 bp, Artificial Sequence
  Description of Artificial Sequence: Synthetic Linker
cagctgatagggatgctacaaggcctgatgcgtgacctg

SEQ ID NO: 208466 - protein, 4 aa, Artificial Sequence
  Description of Artificial Sequence: Synthetic Linker
ASFE

SEQ ID NO: 208467 - DNA, 12 bp, Artificial Sequence
  Description of Artificial Sequence: Synthetic Linker
gctagcttcgaa

SEQ ID NO: 208468 - protein, 6 aa, Artificial Sequence
  Description of Artificial Sequence: Synthetic Linker
ATKASK

SEQ ID NO: 208469 - protein, 7 aa, Artificial Sequence
  Description of Artificial Sequence: Synthetic Linker
ATKGATK

SEQ ID NO: 208470 - protein, 7 aa, Artificial Sequence
  Description of Artificial Sequence: Synthetic Linker
IAKAFKN

SEQ ID NO: 208471 - protein, 14 aa, Artificial Sequence
  Description of Artificial Sequence: Synthetic Linker
VRGSPAINVAVHVF

SEQ ID NO: 208472 - protein, 18 aa, Artificial Sequence
  Description of Artificial Sequence: Synthetic Linker
GSTSGSGKPGSGEGSTKG

SEQ ID NO: 208473 - protein, 18 aa, Artificial Sequence
  Description of Artificial Sequence: Synthetic Linker
KESGSVSSEQLAQFRSLD

SEQ ID NO: 208474 - protein, 4 aa, Artificial Sequence
  Description of Artificial Sequence: Synthetic Linker
GFLG

SEQ ID NO: 208475 - protein, 6 aa, Artificial Sequence
  Description of Artificial Sequence: Synthetic Linker
PLGLWA

SEQ ID NO: 208476 - protein, 6 aa, Artificial Sequence
  Description of Artificial Sequence: Synthetic Linker
RVLAEA

SEQ ID NO: 208477 - protein, 8 aa, Artificial Sequence
  Description of Artificial Sequence: Synthetic Linker
GGIEGRGS

SEQ ID NO: 208478 - protein, 9 aa, Artificial Sequence
  Description of Artificial Sequence: Synthetic Linker
RRRRRRRRR

SEQ ID NO: 208479 - protein, 10 aa, Artificial Sequence
  Description of Artificial Sequence: Synthetic Linker
EDVVCCSMSY

SEQ ID NO: 208480 - protein, 10 aa, Artificial Sequence
  Description of Artificial Sequence: Synthetic Linker
TRHRQPRGWE

SEQ ID NO: 208481 - protein, 10 aa, Artificial Sequence
  Description of Artificial Sequence: Synthetic Linker
AGNRVRRSVG

SEQ ID NO: 208482 - protein, 12 aa, Artificial Sequence
  Description of Artificial Sequence: Synthetic Linker
CRRRRRREAEAC

SEQ ID NO: 208483 - protein, 17 aa, Artificial Sequence
  Description of Artificial Sequence: Synthetic Linker
VSQTSKLTRAETVFPDV

SEQ ID NO: 208484 - protein, 20 aa, Artificial Sequence
  Description of Artificial Sequence: Synthetic Linker
LEAGCKNFFPRSFTSCGSLE

SEQ ID NO: 208485 - protein, 12 aa, Artificial Sequence
  Description of Artificial Sequence: Synthetic Linker
GSAGSAAGSGEF

SEQ ID NO: 208486 - protein, 14 aa, Artificial Sequence
  Description of Artificial Sequence: Synthetic Linker
EGKSSGSGSESKST

SEQ ID NO: 208487 - protein, 20 aa, Artificial Sequence
  Description of Artificial Sequence: Synthetic Linker
NSGAGSGGSSGSDGASGSRD

SEQ ID NO: 208488 - protein, 8 aa, Artificial Sequence
  Description of Artificial Sequence: Synthetic Linker
LWSLDTTP

SEQ ID NO: 208489 - protein, 4 aa, Artificial Sequence
  Description of Artificial Sequence: Synthetic Linker
MDGA

SEQ ID NO: 208490 - protein, 4 aa, Artificial Sequence
  Description of Artificial Sequence: Synthetic Linker
QGNY

SEQ ID NO: 208491 - protein, 4 aa, Artificial Sequence
  Description of Artificial Sequence: Synthetic Linker
RDGK

SEQ ID NO: 208492 - protein, 5 aa, Artificial Sequence
  Description of Artificial Sequence: Synthetic Linker
DLNVG

SEQ ID NO: 208493 - protein, 5 aa, Artificial Sequence
  Description of Artificial Sequence: Synthetic Linker
MATDE

SEQ ID NO: 208494 - protein, 6 aa, Artificial Sequence
  Description of Artificial Sequence: Synthetic Linker
LTGSGA

SEQ ID NO: 208495 - protein, 7 aa, Artificial Sequence
  Description of Artificial Sequence: Synthetic Linker
FAASGEL

SEQ ID NO: 208496 - protein, 7 aa, Artificial Sequence
  Description of Artificial Sequence: Synthetic Linker
FNNREEQ

SEQ ID NO: 208497 - protein, 7 aa, Artificial Sequence
  Description of Artificial Sequence: Synthetic Linker
GYMARNE

SEQ ID NO: 208498 - protein, 7 aa, Artificial Sequence
  Description of Artificial Sequence: Synthetic Linker
VGTEHAK

SEQ ID NO: 208499 - protein, 5 aa, Artificial Sequence
  Description of Artificial Sequence: Synthetic Linker
LNLDY

SEQ ID NO: 208500 - protein, 14 aa, Artificial Sequence
  Description of Artificial Sequence: Synthetic Linker
KDGVIKGYYAYINP

SEQ ID NO: 208501 - protein, 4 aa, Artificial Sequence
  Description of Artificial Sequence: Synthetic Linker
SKAQ

SEQ ID NO: 208502 - protein, 6 aa, Artificial Sequence
  Description of Artificial Sequence: Synthetic Linker
LFNASA

SEQ ID NO: 208503 - protein, 6 aa, Artificial Sequence
  Description of Artificial Sequence: Synthetic Linker
YQDGSV

SEQ ID NO: 208504 - protein, 7 aa, Artificial Sequence
  Description of Artificial Sequence: Synthetic Linker
IHPQSVI

SEQ ID NO: 208505 - protein, 5 aa, Artificial Sequence
  Description of Artificial Sequence: Synthetic Linker
KNPMD

SEQ ID NO: 208506 - protein, 7 aa, Artificial Sequence
  Description of Artificial Sequence: Synthetic Linker
LGSEVPL

SEQ ID NO: 208507 - protein, 14 aa, Artificial Sequence
  Description of Artificial Sequence: Synthetic Linker
LNVNNKVPNGATSM

SEQ ID NO: 208508 - protein, 5 aa, Artificial Sequence
  Description of Artificial Sequence: Synthetic Linker
TTDDL

SEQ ID NO: 208509 - protein, 6 aa, Artificial Sequence
  Description of Artificial Sequence: Synthetic Linker
AAGIRA

SEQ ID NO: 208510 - protein, 6 aa, Artificial Sequence
  Description of Artificial Sequence: Synthetic Linker
QAGVDC

SEQ ID NO: 208511 - protein, 6 aa, Artificial Sequence
  Description of Artificial Sequence: Synthetic Linker
YNPTDI

SEQ ID NO: 208512 - protein, 8 aa, Artificial Sequence
  Description of Artificial Sequence: Synthetic Linker
EFLPRDTG

SEQ ID NO: 208513 - protein, 9 aa, Artificial Sequence
  Description of Artificial Sequence: Synthetic Linker
GSGLPEQTD

SEQ ID NO: 208514 - protein, 5 aa, Artificial Sequence
  Description of Artificial Sequence: Synthetic Linker
YSSNV

SEQ ID NO: 208515 - protein, 6 aa, Artificial Sequence
  Description of Artificial Sequence: Synthetic Linker
KAGLNP

SEQ ID NO: 208516 - protein, 6 aa, Artificial Sequence
  Description of Artificial Sequence: Synthetic Linker
KEEGKF

SEQ ID NO: 208517 - protein, 6 aa, Artificial Sequence
  Description of Artificial Sequence: Synthetic Linker
VRGGIW

SEQ ID NO: 208518 - protein, 9 aa, Artificial Sequence
  Description of Artificial Sequence: Synthetic Linker
QRYLKPENK

SEQ ID NO: 208519 - protein, 6 aa, Artificial Sequence
  Description of Artificial Sequence: Synthetic Linker
EGVGEI

SEQ ID NO: 208520 - protein, 8 aa, Artificial Sequence
  Description of Artificial Sequence: Synthetic Linker
PVDPPEKW

SEQ ID NO: 208521 - protein, 9 aa, Artificial Sequence
  Description of Artificial Sequence: Synthetic Linker
AHPGVSIPT

SEQ ID NO: 208522 - protein, 15 aa, Artificial Sequence
  Description of Artificial Sequence: Synthetic Linker
FKDPELPRNTPKRSI

SEQ ID NO: 208523 - protein, 14 aa, Artificial Sequence
  Description of Artificial Sequence: Synthetic Linker
YLEGVERNPVGAGL

SEQ ID NO: 208524 - protein, 5 aa, Artificial Sequence
  Description of Artificial Sequence: Synthetic Linker
CPRCP

SEQ ID NO: 208525 - protein, 7 aa, Artificial Sequence
  Description of Artificial Sequence: Synthetic Linker
APPVAGP

SEQ ID NO: 208526 - protein, 8 aa, Artificial Sequence
  Description of Artificial Sequence: Synthetic Linker
APELLGGP

SEQ ID NO: 208527 - protein, 9 aa, Artificial Sequence
  Description of Artificial Sequence: Synthetic Linker
CCVECPPCP

SEQ ID NO: 208528 - protein, 12 aa, Artificial Sequence
  Description of Artificial Sequence: Synthetic Linker
ELKTPLGDTTHT

SEQ ID NO: 208529 - protein, 6 aa, Artificial Sequence
  Description of Artificial Sequence: Synthetic Linker
HNVDDV

SEQ ID NO: 208530 - protein, 6 aa, Artificial Sequence
  Description of Artificial Sequence: Synthetic Linker
AGQKDE

SEQ ID NO: 208531 - protein, 9 aa, Artificial Sequence
  Description of Artificial Sequence: Synthetic Linker
KLNLPILPT

SEQ ID NO: 208532 - protein, 9 aa, Artificial Sequence
  Description of Artificial Sequence: Synthetic Linker
SSPRVTNEG

SEQ ID NO: 208533 - protein, 17 aa, Artificial Sequence
  Description of Artificial Sequence: Synthetic Linker
KAAAALKGSDHRRATNV

SEQ ID NO: 208534 - protein, 4 aa, Artificial Sequence
  Description of Artificial Sequence: Synthetic Linker
KKRV

SEQ ID NO: 208535 - protein, 5 aa, Artificial Sequence
  Description of Artificial Sequence: Synthetic Linker
QLEVK

SEQ ID NO: 208536 - protein, 5 aa, Artificial Sequence
  Description of Artificial Sequence: Synthetic Linker
TNGRL

SEQ ID NO: 208537 - protein, 10 aa, Artificial Sequence
  Description of Artificial Sequence: Synthetic Linker
LYTPEIAENQ

SEQ ID NO: 208538 - protein, 4 aa, Artificial Sequence
  Description of Artificial Sequence: Synthetic Linker
NSEY

SEQ ID NO: 208539 - protein, 5 aa, Artificial Sequence
  Description of Artificial Sequence: Synthetic Linker
SMKDF

SEQ ID NO: 208540 - protein, 12 aa, Artificial Sequence
  Description of Artificial Sequence: Synthetic Linker
KDRWQERHILRP

SEQ ID NO: 208541 - protein, 14 aa, Artificial Sequence
  Description of Artificial Sequence: Synthetic Linker
DDPEGPVMPGSHSV

SEQ ID NO: 208542 - protein, 23 aa, Artificial Sequence
  Description of Artificial Sequence: Synthetic Linker
LCPSNPTCIYKYGDESSNSLPGH

SEQ ID NO: 208543 - protein, 35 aa, Artificial Sequence
  Description of Artificial Sequence: Synthetic Linker
LCEALQHNLPPFTPPPHTEDSVYPMPRVIFRMFDY

SEQ ID NO: 208544 - protein, 5 aa, Artificial Sequence
  Description of Artificial Sequence: Synthetic Linker
NMVTC

SEQ ID NO: 208545 - protein, 10 aa, Artificial Sequence
  Description of Artificial Sequence: Synthetic Linker
NLEEHLGKLN

SEQ ID NO: 208546 - protein, 4 aa, Artificial Sequence
  Description of Artificial Sequence: Synthetic Linker
QGAH

SEQ ID NO: 208547 - protein, 6 aa, Artificial Sequence
  Description of Artificial Sequence: Synthetic Linker
QRIPLY

SEQ ID NO: 208548 - protein, 8 aa, Artificial Sequence
  Description of Artificial Sequence: Synthetic Linker
QRKPLFYI

SEQ ID NO: 208549 - protein, 4 aa, Artificial Sequence
  Description of Artificial Sequence: Synthetic Linker
AGGR

SEQ ID NO: 208550 - protein, 6 aa, Artificial Sequence
  Description of Artificial Sequence: Synthetic Linker
YPYKGE

SEQ ID NO: 208551 - protein, 7 aa, Artificial Sequence
  Description of Artificial Sequence: Synthetic Linker
NHETGEL

SEQ ID NO: 208552 - protein, 8 aa, Artificial Sequence
  Description of Artificial Sequence: Synthetic Linker
TFELKTDV

SEQ ID NO: 208553 - protein, 25 aa, Artificial Sequence
  Description of Artificial Sequence: Synthetic Linker
ALGLPHSDVFRQAKDVAESDRGFSL

SEQ ID NO: 208554 - protein, 4 aa, Artificial Sequence
  Description of Artificial Sequence: Synthetic Linker
LKDW

SEQ ID NO: 208555 - protein, 4 aa, Artificial Sequence
  Description of Artificial Sequence: Synthetic Linker
WTGM

SEQ ID NO: 208556 - protein, 4 aa, Artificial Sequence
  Description of Artificial Sequence: Synthetic Linker
YNGL

SEQ ID NO: 208557 - protein, 5 aa, Artificial Sequence
  Description of Artificial Sequence: Synthetic Linker
DRPGE

SEQ ID NO: 208558 - protein, 5 aa, Artificial Sequence
  Description of Artificial Sequence: Synthetic Linker
LGVSI

SEQ ID NO: 208559 - protein, 5 aa, Artificial Sequence
  Description of Artificial Sequence: Synthetic Linker
RSTGR

SEQ ID NO: 208560 - protein, 5 aa, Artificial Sequence
  Description of Artificial Sequence: Synthetic Linker
YRMLP

SEQ ID NO: 208561 - protein, 5 aa, Artificial Sequence
  Description of Artificial Sequence: Synthetic Linker
YVNDF

SEQ ID NO: 208562 - protein, 6 aa, Artificial Sequence
  Description of Artificial Sequence: Synthetic Linker
EYGSPR

SEQ ID NO: 208563 - protein, 6 aa, Artificial Sequence
  Description of Artificial Sequence: Synthetic Linker
IDRGRV

SEQ ID NO: 208564 - protein, 7 aa, Artificial Sequence
  Description of Artificial Sequence: Synthetic Linker
RAADGQM

SEQ ID NO: 208565 - protein, 7 aa, Artificial Sequence
  Description of Artificial Sequence: Synthetic Linker
TKEKNNV

SEQ ID NO: 208566 - protein, 8 aa, Artificial Sequence
  Description of Artificial Sequence: Synthetic Linker
DQAGLGHE

SEQ ID NO: 208567 - protein, 8 aa, Artificial Sequence
  Description of Artificial Sequence: Synthetic Linker
FSQIKDAM

SEQ ID NO: 208568 - protein, 8 aa, Artificial Sequence
  Description of Artificial Sequence: Synthetic Linker
QAAPGKST

SEQ ID NO: 208569 - protein, 8 aa, Artificial Sequence
  Description of Artificial Sequence: Synthetic Linker
QLPAGATQ

SEQ ID NO: 208570 - protein, 9 aa, Artificial Sequence
  Description of Artificial Sequence: Synthetic Linker
AAKHPDMLT

SEQ ID NO: 208571 - protein, 9 aa, Artificial Sequence
  Description of Artificial Sequence: Synthetic Linker
LASKLPTGV

SEQ ID NO: 208572 - protein, 9 aa, Artificial Sequence
  Description of Artificial Sequence: Synthetic Linker
PNGLEDTPQ

SEQ ID NO: 208573 - protein, 9 aa, Artificial Sequence
  Description of Artificial Sequence: Synthetic Linker
QERLSGNQA

SEQ ID NO: 208574 - protein, 12 aa, Artificial Sequence
  Description of Artificial Sequence: Synthetic Linker
NGFGFAGRGQNT

SEQ ID NO: 208575 - protein, 14 aa, Artificial Sequence
  Description of Artificial Sequence: Synthetic Linker
RLPSSFLPDEDQGV

SEQ ID NO: 208576 - protein, 15 aa, Artificial Sequence
  Description of Artificial Sequence: Synthetic Linker
FNLPAIVELGTATGF

SEQ ID NO: 208577 - protein, 17 aa, Artificial Sequence
  Description of Artificial Sequence: Synthetic Linker
MLKPIAKGDHGEGKKGF

SEQ ID NO: 208578 - protein, 7 aa, Artificial Sequence
  Description of Artificial Sequence: Synthetic Linker
LAHLLPP

SEQ ID NO: 208579 - protein, 9 aa, Artificial Sequence
  Description of Artificial Sequence: Synthetic Linker
QAPEAGFEH

SEQ ID NO: 208580 - protein, 10 aa, Artificial Sequence
  Description of Artificial Sequence: Synthetic Linker
KDKFICDRPL

SEQ ID NO: 208581 - protein, 16 aa, Artificial Sequence
  Description of Artificial Sequence: Synthetic Linker
PVEFHNPLKGHVAEPH

SEQ ID NO: 208582 - protein, 16 aa, Artificial Sequence
  Description of Artificial Sequence: Synthetic Linker
QKTMPSAPAPDGLPSE

SEQ ID NO: 208583 - protein, 4 aa, Artificial Sequence
  Description of Artificial Sequence: Synthetic Linker
AGRV

SEQ ID NO: 208584 - protein, 6 aa, Artificial Sequence
  Description of Artificial Sequence: Synthetic Linker
AGHGFA

SEQ ID NO: 208585 - protein, 10 aa, Artificial Sequence
  Description of Artificial Sequence: Synthetic Linker
LPPGPGPFPG

SEQ ID NO: 208586 - protein, 11 aa, Artificial Sequence
  Description of Artificial Sequence: Synthetic Linker
IFGIGGGLLEY

SEQ ID NO: 208587 - protein, 15 aa, Artificial Sequence
  Description of Artificial Sequence: Synthetic Linker
AYYNFEDLPNNMDNI

SEQ ID NO: 208588 - protein, 10 aa, Artificial Sequence
  Description of Artificial Sequence: Synthetic Linker
MICTRSKPKC

SEQ ID NO: 208589 - protein, 6 aa, Artificial Sequence
  Description of Artificial Sequence: Synthetic Linker
QSSLDL

SEQ ID NO: 208590 - protein, 6 aa, Artificial Sequence
  Description of Artificial Sequence: Synthetic Linker
IPDGDE

SEQ ID NO: 208591 - protein, 15 aa, Artificial Sequence
  Description of Artificial Sequence: Synthetic Linker
PTNPVTGEIPTLSAL

SEQ ID NO: 208592 - protein, 9 aa, Artificial Sequence
  Description of Artificial Sequence: Synthetic Linker
GGPCRADIK

SEQ ID NO: 208593 - protein, 11 aa, Artificial Sequence
  Description of Artificial Sequence: Synthetic Linker
SGACSTDKPCG

SEQ ID NO: 208594 - protein, 11 aa, Artificial Sequence
  Description of Artificial Sequence: Synthetic Linker
EGSKTVPIADK

SEQ ID NO: 208595 - protein, 7 aa, Artificial Sequence
  Description of Artificial Sequence: Synthetic Linker
INGKKPE

SEQ ID NO: 208596 - protein, 8 aa, Artificial Sequence
  Description of Artificial Sequence: Synthetic Linker
ELPAYMSG

SEQ ID NO: 208597 - protein, 8 aa, Artificial Sequence
  Description of Artificial Sequence: Synthetic Linker
VTGTLDYG

SEQ ID NO: 208598 - protein, 15 aa, Artificial Sequence
  Description of Artificial Sequence: Synthetic Linker
AAEDAIEIHPGTPNV

SEQ ID NO: 208599 - protein, 21 aa, Artificial Sequence
  Description of Artificial Sequence: Synthetic Linker
LEFKMPADGRIWGSKYPRPTA

SEQ ID NO: 208600 - protein, 5 aa, Artificial Sequence
  Description of Artificial Sequence: Synthetic Linker
SDYDV

SEQ ID NO: 208601 - protein, 5 aa, Artificial Sequence
  Description of Artificial Sequence: Synthetic Linker
VGSGP

SEQ ID NO: 208602 - protein, 6 aa, Artificial Sequence
  Description of Artificial Sequence: Synthetic Linker
IDSQSA

SEQ ID NO: 208603 - protein, 6 aa, Artificial Sequence
  Description of Artificial Sequence: Synthetic Linker
NKRDAY

SEQ ID NO: 208604 - protein, 6 aa, Artificial Sequence
  Description of Artificial Sequence: Synthetic Linker
RKGIRT

SEQ ID NO: 208605 - protein, 7 aa, Artificial Sequence
  Description of Artificial Sequence: Synthetic Linker
MGERFGG

SEQ ID NO: 208606 - protein, 8 aa, Artificial Sequence
  Description of Artificial Sequence: Synthetic Linker
VDTGAEKR

SEQ ID NO: 208607 - protein, 10 aa, Artificial Sequence
  Description of Artificial Sequence: Synthetic Linker
TGGHPSKEAQ

SEQ ID NO: 208608 - protein, 10 aa, Artificial Sequence
  Description of Artificial Sequence: Synthetic Linker
VPAATEGGLH

SEQ ID NO: 208609 - protein, 18 aa, Artificial Sequence
  Description of Artificial Sequence: Synthetic Linker
VLDTVDIENYISVPKTEG

SEQ ID NO: 208610 - protein, 5 aa, Artificial Sequence
  Description of Artificial Sequence: Synthetic Linker
DLAYV

SEQ ID NO: 208611 - protein, 13 aa, Artificial Sequence
  Description of Artificial Sequence: Synthetic Linker
VVPPELKTKDHII

SEQ ID NO: 208612 - protein, 5 aa, Artificial Sequence
  Description of Artificial Sequence: Synthetic Linker
WKQHK

SEQ ID NO: 208613 - protein, 7 aa, Artificial Sequence
  Description of Artificial Sequence: Synthetic Linker
KIQGCSA

SEQ ID NO: 208614 - protein, 8 aa, Artificial Sequence
  Description of Artificial Sequence: Synthetic Linker
DVASGDGL

SEQ ID NO: 208615 - protein, 20 aa, Artificial Sequence
  Description of Artificial Sequence: Synthetic Linker
VSPWHRMSYFFNPVSNFISF

SEQ ID NO: 208616 - protein, 5 aa, Artificial Sequence
  Description of Artificial Sequence: Synthetic Linker
YDNDE

SEQ ID NO: 208617 - protein, 10 aa, Artificial Sequence
  Description of Artificial Sequence: Synthetic Linker
RNGDSRRPGL

SEQ ID NO: 208618 - protein, 4 aa, Artificial Sequence
  Description of Artificial Sequence: Synthetic Linker
VEET

SEQ ID NO: 208619 - protein, 6 aa, Artificial Sequence
  Description of Artificial Sequence: Synthetic Linker
AIQDIS

SEQ ID NO: 208620 - protein, 6 aa, Artificial Sequence
  Description of Artificial Sequence: Synthetic Linker
KLPITL

SEQ ID NO: 208621 - protein, 11 aa, Artificial Sequence
  Description of Artificial Sequence: Synthetic Linker
ADSAYITYAND

SEQ ID NO: 208622 - protein, 4 aa, Artificial Sequence
  Description of Artificial Sequence: Synthetic Linker
FGGV

SEQ ID NO: 208623 - protein, 4 aa, Artificial Sequence
  Description of Artificial Sequence: Synthetic Linker
YGIK

SEQ ID NO: 208624 - protein, 5 aa, Artificial Sequence
  Description of Artificial Sequence: Synthetic Linker
INFNS

SEQ ID NO: 208625 - protein, 5 aa, Artificial Sequence
  Description of Artificial Sequence: Synthetic Linker
YGRDH

SEQ ID NO: 208626 - protein, 6 aa, Artificial Sequence
  Description of Artificial Sequence: Synthetic Linker
GMSRTN

SEQ ID NO: 208627 - protein, 7 aa, Artificial Sequence
  Description of Artificial Sequence: Synthetic Linker
ASLGING

SEQ ID NO: 208628 - protein, 7 aa, Artificial Sequence
  Description of Artificial Sequence: Synthetic Linker
SAPRLQH

SEQ ID NO: 208629 - protein, 7 aa, Artificial Sequence
  Description of Artificial Sequence: Synthetic Linker
YIPDFGG

SEQ ID NO: 208630 - protein, 8 aa, Artificial Sequence
  Description of Artificial Sequence: Synthetic Linker
SLPNYLAP

SEQ ID NO: 208631 - protein, 9 aa, Artificial Sequence
  Description of Artificial Sequence: Synthetic Linker
LDGKFADNV

SEQ ID NO: 208632 - protein, 9 aa, Artificial Sequence
  Description of Artificial Sequence: Synthetic Linker
VINNVNADP

SEQ ID NO: 208633 - protein, 10 aa, Artificial Sequence
  Description of Artificial Sequence: Synthetic Linker
QTQHALEKLS

SEQ ID NO: 208634 - protein, 11 aa, Artificial Sequence
  Description of Artificial Sequence: Synthetic Linker
EGKVFKTRHTG

SEQ ID NO: 208635 - protein, 11 aa, Artificial Sequence
  Description of Artificial Sequence: Synthetic Linker
VKADSEGQPGP

SEQ ID NO: 208636 - protein, 12 aa, Artificial Sequence
  Description of Artificial Sequence: Synthetic Linker
RAFVYHPDIEDR

SEQ ID NO: 208637 - protein, 13 aa, Artificial Sequence
  Description of Artificial Sequence: Synthetic Linker
AFGDVDTADPLDP

SEQ ID NO: 208638 - protein, 13 aa, Artificial Sequence
  Description of Artificial Sequence: Synthetic Linker
LKTETHARGEGST

SEQ ID NO: 208639 - protein, 16 aa, Artificial Sequence
  Description of Artificial Sequence: Synthetic Linker
KNGPIDFQPREPFSAL

SEQ ID NO: 208640 - protein, 16 aa, Artificial Sequence
  Description of Artificial Sequence: Synthetic Linker
VINPGTDRNWTGHPFV

SEQ ID NO: 208641 - protein, 17 aa, Artificial Sequence
  Description of Artificial Sequence: Synthetic Linker
QITQEYFGFATHLAYQG

SEQ ID NO: 208642 - protein, 22 aa, Artificial Sequence
  Description of Artificial Sequence: Synthetic Linker
NHWDNLNRVVERGYAGLSLWDW

SEQ ID NO: 208643 - protein, 15 aa, Artificial Sequence
  Description of Artificial Sequence: Synthetic Linker
VGSLVSGPSFTSGEV

SEQ ID NO: 208644 - protein, 13 aa, Artificial Sequence
  Description of Artificial Sequence: Synthetic Linker
ITSQETDGWYTLA

SEQ ID NO: 208645 - protein, 21 aa, Artificial Sequence
  Description of Artificial Sequence: Synthetic Linker
RNKEGQDVNEQGQPIRGRTQD

SEQ ID NO: 208646 - protein, 5 aa, Artificial Sequence
  Description of Artificial Sequence: Synthetic Linker
HFQPF

SEQ ID NO: 208647 - protein, 5 aa, Artificial Sequence
  Description of Artificial Sequence: Synthetic Linker
TGTPV

SEQ ID NO: 208648 - protein, 7 aa, Artificial Sequence
  Description of Artificial Sequence: Synthetic Linker
PLSHFDA

SEQ ID NO: 208649 - protein, 4 aa, Artificial Sequence
  Description of Artificial Sequence: Synthetic Linker
FNPI

SEQ ID NO: 208650 - protein, 4 aa, Artificial Sequence
  Description of Artificial Sequence: Synthetic Linker
KNGS

SEQ ID NO: 208651 - protein, 5 aa, Artificial Sequence
  Description of Artificial Sequence: Synthetic Linker
DRFQG

SEQ ID NO: 208652 - protein, 5 aa, Artificial Sequence
  Description of Artificial Sequence: Synthetic Linker
EVPDI

SEQ ID NO: 208653 - protein, 6 aa, Artificial Sequence
  Description of Artificial Sequence: Synthetic Linker
ACELHT

SEQ ID NO: 208654 - protein, 6 aa, Artificial Sequence
  Description of Artificial Sequence: Synthetic Linker
LPATLT

SEQ ID NO: 208655 - protein, 6 aa, Artificial Sequence
  Description of Artificial Sequence: Synthetic Linker
LPDPYG

SEQ ID NO: 208656 - protein, 6 aa, Artificial Sequence
  Description of Artificial Sequence: Synthetic Linker
LPHAQP

SEQ ID NO: 208657 - protein, 6 aa, Artificial Sequence
  Description of Artificial Sequence: Synthetic Linker
RQQASF

SEQ ID NO: 208658 - protein, 6 aa, Artificial Sequence
  Description of Artificial Sequence: Synthetic Linker
YIGGNL

SEQ ID NO: 208659 - protein, 7 aa, Artificial Sequence
  Description of Artificial Sequence: Synthetic Linker
FGRTCKE

SEQ ID NO: 208660 - protein, 7 aa, Artificial Sequence
  Description of Artificial Sequence: Synthetic Linker
VDKGDNV

SEQ ID NO: 208661 - protein, 7 aa, Artificial Sequence
  Description of Artificial Sequence: Synthetic Linker
WGPECNH

SEQ ID NO: 208662 - protein, 8 aa, Artificial Sequence
  Description of Artificial Sequence: Synthetic Linker
VRRCEAQK

SEQ ID NO: 208663 - protein, 9 aa, Artificial Sequence
  Description of Artificial Sequence: Synthetic Linker
KVLIKEEDA

SEQ ID NO: 208664 - protein, 9 aa, Artificial Sequence
  Description of Artificial Sequence: Synthetic Linker
SCATGWKGL

SEQ ID NO: 208665 - protein, 10 aa, Artificial Sequence
  Description of Artificial Sequence: Synthetic Linker
IVDLPDHIEV

SEQ ID NO: 208666 - protein, 10 aa, Artificial Sequence
  Description of Artificial Sequence: Synthetic Linker
LCTACMNNGV

SEQ ID NO: 208667 - protein, 13 aa, Artificial Sequence
  Description of Artificial Sequence: Synthetic Linker
RCSGQEGCKSYVF

SEQ ID NO: 208668 - protein, 22 aa, Artificial Sequence
  Description of Artificial Sequence: Synthetic Linker
LCSPGWQGLQCEREGIPRMTPK

SEQ ID NO: 208669 - protein, 25 aa, Artificial Sequence
  Description of Artificial Sequence: Synthetic Linker
CNEACHPGFYGPDCKLRCSCNNGEM

SEQ ID NO: 208670 - protein, 4 aa, Artificial Sequence
  Description of Artificial Sequence: Synthetic Linker
LKTP

SEQ ID NO: 208671 - protein, 14 aa, Artificial Sequence
  Description of Artificial Sequence: Synthetic Linker
AKGRRAEDGSVIDY

SEQ ID NO: 208672 - protein, 12 aa, Artificial Sequence
  Description of Artificial Sequence: Synthetic Linker
AARPLRVHRRPL

SEQ ID NO: 208673 - protein, 4 aa, Artificial Sequence
  Description of Artificial Sequence: Synthetic Linker
LIPL

SEQ ID NO: 208674 - protein, 5 aa, Artificial Sequence
  Description of Artificial Sequence: Synthetic Linker
FGEGA

SEQ ID NO: 208675 - protein, 6 aa, Artificial Sequence
  Description of Artificial Sequence: Synthetic Linker
AFDDAK

SEQ ID NO: 208676 - protein, 6 aa, Artificial Sequence
  Description of Artificial Sequence: Synthetic Linker
KVNGKR

SEQ ID NO: 208677 - protein, 7 aa, Artificial Sequence
  Description of Artificial Sequence: Synthetic Linker
LSKTGMP

SEQ ID NO: 208678 - protein, 8 aa, Artificial Sequence
  Description of Artificial Sequence: Synthetic Linker
VLPYPRMR

SEQ ID NO: 208679 - protein, 8 aa, Artificial Sequence
  Description of Artificial Sequence: Synthetic Linker
VRADDGLL

SEQ ID NO: 208680 - protein, 16 aa, Artificial Sequence
  Description of Artificial Sequence: Synthetic Linker
EAEDDFKIEKPTKEDA

SEQ ID NO: 208681 - protein, 5 aa, Artificial Sequence
  Description of Artificial Sequence: Synthetic Linker
IRFGR

SEQ ID NO: 208682 - protein, 6 aa, Artificial Sequence
  Description of Artificial Sequence: Synthetic Linker
QTETHV

SEQ ID NO: 208683 - protein, 13 aa, Artificial Sequence
  Description of Artificial Sequence: Synthetic Linker
PLKGRYTPSVGDV

SEQ ID NO: 208684 - protein, 7 aa, Artificial Sequence
  Description of Artificial Sequence: Synthetic Linker
KNPALSD

SEQ ID NO: 208685 - protein, 12 aa, Artificial Sequence
  Description of Artificial Sequence: Synthetic Linker
RFGSSEIGKGKK

SEQ ID NO: 208686 - protein, 14 aa, Artificial Sequence
  Description of Artificial Sequence: Synthetic Linker
GKFSGRKGTWVGFT

SEQ ID NO: 208687 - protein, 9 aa, Artificial Sequence
  Description of Artificial Sequence: Synthetic Linker
QFFMSDKPL

SEQ ID NO: 208688 - protein, 11 aa, Artificial Sequence
  Description of Artificial Sequence: Synthetic Linker
HAPRDMGPQPR

SEQ ID NO: 208689 - protein, 12 aa, Artificial Sequence
  Description of Artificial Sequence: Synthetic Linker
HFKPAPWNGLPA

SEQ ID NO: 208690 - protein, 6 aa, Artificial Sequence
  Description of Artificial Sequence: Synthetic Linker
LDPPKQ

SEQ ID NO: 208691 - protein, 6 aa, Artificial Sequence
  Description of Artificial Sequence: Synthetic Linker
TATADD

SEQ ID NO: 208692 - protein, 7 aa, Artificial Sequence
  Description of Artificial Sequence: Synthetic Linker
AEAQTCR

SEQ ID NO: 208693 - protein, 7 aa, Artificial Sequence
  Description of Artificial Sequence: Synthetic Linker
EEKPQGQ

SEQ ID NO: 208694 - protein, 7 aa, Artificial Sequence
  Description of Artificial Sequence: Synthetic Linker
LGLNDPL

SEQ ID NO: 208695 - protein, 7 aa, Artificial Sequence
  Description of Artificial Sequence: Synthetic Linker
RFPTLPF

SEQ ID NO: 208696 - protein, 9 aa, Artificial Sequence
  Description of Artificial Sequence: Synthetic Linker
ISSFDRPNI

SEQ ID NO: 208697 - protein, 13 aa, Artificial Sequence
  Description of Artificial Sequence: Synthetic Linker
YFGEGRQEPCGNC

SEQ ID NO: 208698 - protein, 7 aa, Artificial Sequence
  Description of Artificial Sequence: Synthetic Linker
LGLNRKW

SEQ ID NO: 208699 - protein, 12 aa, Artificial Sequence
  Description of Artificial Sequence: Synthetic Linker
YFGSYGTRGVGY

SEQ ID NO: 208700 - protein, 4 aa, Artificial Sequence
  Description of Artificial Sequence: Synthetic Linker
NIKG

SEQ ID NO: 208701 - protein, 5 aa, Artificial Sequence
  Description of Artificial Sequence: Synthetic Linker
NPVPQ

SEQ ID NO: 208702 - protein, 6 aa, Artificial Sequence
  Description of Artificial Sequence: Synthetic Linker
AKFPAD

SEQ ID NO: 208703 - protein, 6 aa, Artificial Sequence
  Description of Artificial Sequence: Synthetic Linker
IQNVDF

SEQ ID NO: 208704 - protein, 6 aa, Artificial Sequence
  Description of Artificial Sequence: Synthetic Linker
LTGQMV

SEQ ID NO: 208705 - protein, 8 aa, Artificial Sequence
  Description of Artificial Sequence: Synthetic Linker
AAEDARQY

SEQ ID NO: 208706 - protein, 16 aa, Artificial Sequence
  Description of Artificial Sequence: Synthetic Linker
KLDGSQTSKWLSSEPL

SEQ ID NO: 208707 - protein, 4 aa, Artificial Sequence
  Description of Artificial Sequence: Synthetic Linker
DIFK

SEQ ID NO: 208708 - protein, 4 aa, Artificial Sequence
  Description of Artificial Sequence: Synthetic Linker
LPGM

SEQ ID NO: 208709 - protein, 6 aa, Artificial Sequence
  Description of Artificial Sequence: Synthetic Linker
IPGNGG

SEQ ID NO: 208710 - protein, 6 aa, Artificial Sequence
  Description of Artificial Sequence: Synthetic Linker
VEDWVE

SEQ ID NO: 208711 - protein, 15 aa, Artificial Sequence
  Description of Artificial Sequence: Synthetic Linker
RLKADETYTSPEDYF

SEQ ID NO: 208712 - protein, 5 aa, Artificial Sequence
  Description of Artificial Sequence: Synthetic Linker
RKPTE

SEQ ID NO: 208713 - protein, 6 aa, Artificial Sequence
  Description of Artificial Sequence: Synthetic Linker
YARTIV

SEQ ID NO: 208714 - protein, 4 aa, Artificial Sequence
  Description of Artificial Sequence: Synthetic Linker
REDG

SEQ ID NO: 208715 - protein, 4 aa, Artificial Sequence
  Description of Artificial Sequence: Synthetic Linker
YKTL

SEQ ID NO: 208716 - protein, 6 aa, Artificial Sequence
  Description of Artificial Sequence: Synthetic Linker
DRAKRI

SEQ ID NO: 208717 - protein, 11 aa, Artificial Sequence
  Description of Artificial Sequence: Synthetic Linker
KAPQTEPPASI

SEQ ID NO: 208718 - protein, 21 aa, Artificial Sequence
  Description of Artificial Sequence: Synthetic Linker
AAQSDRPAHAQGVPLTRIERT

SEQ ID NO: 208719 - protein, 8 aa, Artificial Sequence
  Description of Artificial Sequence: Synthetic Linker
DWDKDADP

SEQ ID NO: 208720 - protein, 14 aa, Artificial Sequence
  Description of Artificial Sequence: Synthetic Linker
LFDRHVSSSVRLND

SEQ ID NO: 208721 - protein, 26 aa, Artificial Sequence
  Description of Artificial Sequence: Synthetic Linker
LVEESSRQLPTAAPEPAKVDQDAGRL

SEQ ID NO: 208722 - protein, 6 aa, Artificial Sequence
  Description of Artificial Sequence: Synthetic Linker
LLGVTP

SEQ ID NO: 208723 - protein, 4 aa, Artificial Sequence
  Description of Artificial Sequence: Synthetic Linker
DTLP

SEQ ID NO: 208724 - protein, 4 aa, Artificial Sequence
  Description of Artificial Sequence: Synthetic Linker
ENGL

SEQ ID NO: 208725 - protein, 4 aa, Artificial Sequence
  Description of Artificial Sequence: Synthetic Linker
FREV

SEQ ID NO: 208726 - protein, 4 aa, Artificial Sequence
  Description of Artificial Sequence: Synthetic Linker
KVSP

SEQ ID NO: 208727 - protein, 4 aa, Artificial Sequence
  Description of Artificial Sequence: Synthetic Linker
LDGK

SEQ ID NO: 208728 - protein, 4 aa, Artificial Sequence
  Description of Artificial Sequence: Synthetic Linker
LNGK

SEQ ID NO: 208729 - protein, 4 aa, Artificial Sequence
  Description of Artificial Sequence: Synthetic Linker
PLLI

SEQ ID NO: 208730 - protein, 4 aa, Artificial Sequence
  Description of Artificial Sequence: Synthetic Linker
SGQT

SEQ ID NO: 208731 - protein, 5 aa, Artificial Sequence
  Description of Artificial Sequence: Synthetic Linker
KNPRG

SEQ ID NO: 208732 - protein, 5 aa, Artificial Sequence
  Description of Artificial Sequence: Synthetic Linker
KPTTQ

SEQ ID NO: 208733 - protein, 5 aa, Artificial Sequence
  Description of Artificial Sequence: Synthetic Linker
SLKWK

SEQ ID NO: 208734 - protein, 5 aa, Artificial Sequence
  Description of Artificial Sequence: Synthetic Linker
TSEMD

SEQ ID NO: 208735 - protein, 6 aa, Artificial Sequence
  Description of Artificial Sequence: Synthetic Linker
LSGQEA

SEQ ID NO: 208736 - protein, 9 aa, Artificial Sequence
  Description of Artificial Sequence: Synthetic Linker
PLDVAPQGK

SEQ ID NO: 208737 - protein, 11 aa, Artificial Sequence
  Description of Artificial Sequence: Synthetic Linker
AKNTYDDSAWT

SEQ ID NO: 208738 - protein, 12 aa, Artificial Sequence
  Description of Artificial Sequence: Synthetic Linker
ELPELPQPESAG

SEQ ID NO: 208739 - protein, 12 aa, Artificial Sequence
  Description of Artificial Sequence: Synthetic Linker
QPNATAWSEAGH

SEQ ID NO: 208740 - protein, 12 aa, Artificial Sequence
  Description of Artificial Sequence: Synthetic Linker
SEYLFRHSDNEL

SEQ ID NO: 208741 - protein, 13 aa, Artificial Sequence
  Description of Artificial Sequence: Synthetic Linker
VAYTAPKVQLPSL

SEQ ID NO: 208742 - protein, 15 aa, Artificial Sequence
  Description of Artificial Sequence: Synthetic Linker
NLSVTLPAASHAIPH

SEQ ID NO: 208743 - protein, 16 aa, Artificial Sequence
  Description of Artificial Sequence: Synthetic Linker
IDNMGLDEDWTIGSED

SEQ ID NO: 208744 - protein, 23 aa, Artificial Sequence
  Description of Artificial Sequence: Synthetic Linker
TGNLGGENYRDTVRGPLNEGGLY

SEQ ID NO: 208745 - protein, 10 aa, Artificial Sequence
  Description of Artificial Sequence: Synthetic Linker
SNADLQTLPA

SEQ ID NO: 208746 - protein, 11 aa, Artificial Sequence
  Description of Artificial Sequence: Synthetic Linker
LRGKIVPTPMQ

SEQ ID NO: 208747 - protein, 12 aa, Artificial Sequence
  Description of Artificial Sequence: Synthetic Linker
KGGVAYRLPVPG

SEQ ID NO: 208748 - protein, 11 aa, Artificial Sequence
  Description of Artificial Sequence: Synthetic Linker
QAWATAPYAPT

SEQ ID NO: 208749 - protein, 7 aa, Artificial Sequence
  Description of Artificial Sequence: Synthetic Linker
YSKGVSQ

SEQ ID NO: 208750 - protein, 6 aa, Artificial Sequence
  Description of Artificial Sequence: Synthetic Linker
QKGRVL

SEQ ID NO: 208751 - protein, 6 aa, Artificial Sequence
  Description of Artificial Sequence: Synthetic Linker
VLGKEL

SEQ ID NO: 208752 - protein, 4 aa, Artificial Sequence
  Description of Artificial Sequence: Synthetic Linker
ANTP

SEQ ID NO: 208753 - protein, 4 aa, Artificial Sequence
  Description of Artificial Sequence: Synthetic Linker
DAPT

SEQ ID NO: 208754 - protein, 5 aa, Artificial Sequence
  Description of Artificial Sequence: Synthetic Linker
LDPIK

SEQ ID NO: 208755 - protein, 5 aa, Artificial Sequence
  Description of Artificial Sequence: Synthetic Linker
TTDFQ

SEQ ID NO: 208756 - protein, 6 aa, Artificial Sequence
  Description of Artificial Sequence: Synthetic Linker
PWNKEV

SEQ ID NO: 208757 - protein, 6 aa, Artificial Sequence
  Description of Artificial Sequence: Synthetic Linker
QQLLPP

SEQ ID NO: 208758 - protein, 8 aa, Artificial Sequence
  Description of Artificial Sequence: Synthetic Linker
TDPQTGKT

SEQ ID NO: 208759 - protein, 9 aa, Artificial Sequence
  Description of Artificial Sequence: Synthetic Linker
GRHGIVPTR

SEQ ID NO: 208760 - protein, 9 aa, Artificial Sequence
  Description of Artificial Sequence: Synthetic Linker
TADGSWFFK

SEQ ID NO: 208761 - protein, 12 aa, Artificial Sequence
  Description of Artificial Sequence: Synthetic Linker
LFSMGVTRGKWG

SEQ ID NO: 208762 - protein, 18 aa, Artificial Sequence
  Description of Artificial Sequence: Synthetic Linker
LAPGMGEDGELEETGVPA

SEQ ID NO: 208763 - protein, 21 aa, Artificial Sequence
  Description of Artificial Sequence: Synthetic Linker
CWVMHPGESWHGFKDIPDNWS

SEQ ID NO: 208764 - protein, 7 aa, Artificial Sequence
  Description of Artificial Sequence: Synthetic Linker
EVHVRGH

SEQ ID NO: 208765 - protein, 17 aa, Artificial Sequence
  Description of Artificial Sequence: Synthetic Linker
VGDPGPICRPWECCDKA

SEQ ID NO: 208766 - protein, 7 aa, Artificial Sequence
  Description of Artificial Sequence: Synthetic Linker
KYEIPEG

SEQ ID NO: 208767 - protein, 7 aa, Artificial Sequence
  Description of Artificial Sequence: Synthetic Linker
RKVCEQE

SEQ ID NO: 208768 - protein, 12 aa, Artificial Sequence
  Description of Artificial Sequence: Synthetic Linker
EQLLPKLFDGCY

SEQ ID NO: 208769 - protein, 5 aa, Artificial Sequence
  Description of Artificial Sequence: Synthetic Linker
SLHFS

SEQ ID NO: 208770 - protein, 6 aa, Artificial Sequence
  Description of Artificial Sequence: Synthetic Linker
VYPLQW

SEQ ID NO: 208771 - protein, 7 aa, Artificial Sequence
  Description of Artificial Sequence: Synthetic Linker
KTVSGLY

SEQ ID NO: 208772 - protein, 12 aa, Artificial Sequence
  Description of Artificial Sequence: Synthetic Linker
SDPAFQPPCSEV

SEQ ID NO: 208773 - protein, 13 aa, Artificial Sequence
  Description of Artificial Sequence: Synthetic Linker
SVVKPIGLAPLVY

SEQ ID NO: 208774 - protein, 30 aa, Artificial Sequence
  Description of Artificial Sequence: Synthetic Linker
ARWHSRLGFFRDPRPFPLPLSSLFSDGGNV

SEQ ID NO: 208775 - protein, 15 aa, Artificial Sequence
  Description of Artificial Sequence: Synthetic Linker
ELRSLTRHPKYKTEL

SEQ ID NO: 208776 - protein, 7 aa, Artificial Sequence
  Description of Artificial Sequence: Synthetic Linker
VYNTFCI

SEQ ID NO: 208777 - protein, 4 aa, Artificial Sequence
  Description of Artificial Sequence: Synthetic Linker
AATM

SEQ ID NO: 208778 - protein, 4 aa, Artificial Sequence
  Description of Artificial Sequence: Synthetic Linker
FAGT

SEQ ID NO: 208779 - protein, 4 aa, Artificial Sequence
  Description of Artificial Sequence: Synthetic Linker
RGDF

SEQ ID NO: 208780 - protein, 4 aa, Artificial Sequence
  Description of Artificial Sequence: Synthetic Linker
SNPW

SEQ ID NO: 208781 - protein, 4 aa, Artificial Sequence
  Description of Artificial Sequence: Synthetic Linker
SPDK

SEQ ID NO: 208782 - protein, 7 aa, Artificial Sequence
  Description of Artificial Sequence: Synthetic Linker
KTADQQD

SEQ ID NO: 208783 - protein, 8 aa, Artificial Sequence
  Description of Artificial Sequence: Synthetic Linker
QGAGAVDA

SEQ ID NO: 208784 - protein, 9 aa, Artificial Sequence
  Description of Artificial Sequence: Synthetic Linker
AKQDDDSHY

SEQ ID NO: 208785 - protein, 9 aa, Artificial Sequence
  Description of Artificial Sequence: Synthetic Linker
DKDNTSSKV

SEQ ID NO: 208786 - protein, 9 aa, Artificial Sequence
  Description of Artificial Sequence: Synthetic Linker
NLSALEKPI

SEQ ID NO: 208787 - protein, 11 aa, Artificial Sequence
  Description of Artificial Sequence: Synthetic Linker
IHRHANGKPYA

SEQ ID NO: 208788 - protein, 16 aa, Artificial Sequence
  Description of Artificial Sequence: Synthetic Linker
EGVENIEDIESSEITE

SEQ ID NO: 208789 - protein, 36 aa, Artificial Sequence
  Description of Artificial Sequence: Synthetic Linker
DSKDGSSYYHEANSDAKDQLDGDGLQFYALKNNFTA

SEQ ID NO: 208790 - protein, 9 aa, Artificial Sequence
  Description of Artificial Sequence: Synthetic Linker
GSIQGQDLS

SEQ ID NO: 208791 - protein, 4 aa, Artificial Sequence
  Description of Artificial Sequence: Synthetic Linker
RFDT

SEQ ID NO: 208792 - protein, 15 aa, Artificial Sequence
  Description of Artificial Sequence: Synthetic Linker
TLTTPASNQLLALPR

SEQ ID NO: 208793 - protein, 4 aa, Artificial Sequence
  Description of Artificial Sequence: Synthetic Linker
ELPF

SEQ ID NO: 208794 - protein, 7 aa, Artificial Sequence
  Description of Artificial Sequence: Synthetic Linker
AGDNPDA

SEQ ID NO: 208795 - protein, 7 aa, Artificial Sequence
  Description of Artificial Sequence: Synthetic Linker
VTTAEAY

SEQ ID NO: 208796 - protein, 11 aa, Artificial Sequence
  Description of Artificial Sequence: Synthetic Linker
AFPGLNGMDLA

SEQ ID NO: 208797 - protein, 18 aa, Artificial Sequence
  Description of Artificial Sequence: Synthetic Linker
WTQGSWTLTGGLPQAKKE

SEQ ID NO: 208798 - protein, 16 aa, Artificial Sequence
  Description of Artificial Sequence: Synthetic Linker
RGIKLTKIKLDLPINF

SEQ ID NO: 208799 - protein, 4 aa, Artificial Sequence
  Description of Artificial Sequence: Synthetic Linker
FLDV

SEQ ID NO: 208800 - protein, 5 aa, Artificial Sequence
  Description of Artificial Sequence: Synthetic Linker
QTSLS

SEQ ID NO: 208801 - protein, 26 aa, Artificial Sequence
  Description of Artificial Sequence: Synthetic Linker
YTGKWGLNDVNPEAWPRDLKGMAAVR

SEQ ID NO: 208802 - protein, 17 aa, Artificial Sequence
  Description of Artificial Sequence: Synthetic Linker
VKEGAGQPDFCDGHSPA

SEQ ID NO: 208803 - protein, 9 aa, Artificial Sequence
  Description of Artificial Sequence: Synthetic Linker
VDGSRGDGS

SEQ ID NO: 208804 - protein, 41 aa, Artificial Sequence
  Description of Artificial Sequence: Synthetic Linker
LKARVGSADDAKKDAAKKDDAKKDDAKKDGSQTNKAKNLVQ

SEQ ID NO: 208805 - protein, 7 aa, Artificial Sequence
  Description of Artificial Sequence: Synthetic Linker
VAKEGET

SEQ ID NO: 208806 - protein, 14 aa, Artificial Sequence
  Description of Artificial Sequence: Synthetic Linker
TMKNTGRNVNDRPV

SEQ ID NO: 208807 - protein, 4 aa, Artificial Sequence
  Description of Artificial Sequence: Synthetic Linker
EVND

SEQ ID NO: 208808 - protein, 4 aa, Artificial Sequence
  Description of Artificial Sequence: Synthetic Linker
NSDG

SEQ ID NO: 208809 - protein, 4 aa, Artificial Sequence
  Description of Artificial Sequence: Synthetic Linker
TPYG

SEQ ID NO: 208810 - protein, 5 aa, Artificial Sequence
  Description of Artificial Sequence: Synthetic Linker
GRGNP

SEQ ID NO: 208811 - protein, 5 aa, Artificial Sequence
  Description of Artificial Sequence: Synthetic Linker
SENPV

SEQ ID NO: 208812 - protein, 6 aa, Artificial Sequence
  Description of Artificial Sequence: Synthetic Linker
RAQMDL

SEQ ID NO: 208813 - protein, 6 aa, Artificial Sequence
  Description of Artificial Sequence: Synthetic Linker
RTSRNP

SEQ ID NO: 208814 - protein, 6 aa, Artificial Sequence
  Description of Artificial Sequence: Synthetic Linker
YVLNDI

SEQ ID NO: 208815 - protein, 7 aa, Artificial Sequence
  Description of Artificial Sequence: Synthetic Linker
AKKDGTH

SEQ ID NO: 208816 - protein, 8 aa, Artificial Sequence
  Description of Artificial Sequence: Synthetic Linker
DATHIGKL

SEQ ID NO: 208817 - protein, 8 aa, Artificial Sequence
  Description of Artificial Sequence: Synthetic Linker
KQIGGDGM

SEQ ID NO: 208818 - protein, 8 aa, Artificial Sequence
  Description of Artificial Sequence: Synthetic Linker
VLTIPEII

SEQ ID NO: 208819 - protein, 8 aa, Artificial Sequence
  Description of Artificial Sequence: Synthetic Linker
YKFQEGQE

SEQ ID NO: 208820 - protein, 9 aa, Artificial Sequence
  Description of Artificial Sequence: Synthetic Linker
NAKDDEGVL

SEQ ID NO: 208821 - protein, 9 aa, Artificial Sequence
  Description of Artificial Sequence: Synthetic Linker
SYGQFEDGI

SEQ ID NO: 208822 - protein, 10 aa, Artificial Sequence
  Description of Artificial Sequence: Synthetic Linker
HGHVCFQFDA

SEQ ID NO: 208823 - protein, 16 aa, Artificial Sequence
  Description of Artificial Sequence: Synthetic Linker
LFNPWCEDDAVYLDNE

SEQ ID NO: 208824 - protein, 20 aa, Artificial Sequence
  Description of Artificial Sequence: Synthetic Linker
GSWDNIYAYGVPPSAWTGSV

SEQ ID NO: 208825 - protein, 20 aa, Artificial Sequence
  Description of Artificial Sequence: Synthetic Linker
MYGAKKPLNTEGVMKSRSNV

SEQ ID NO: 208826 - protein, 5 aa, Artificial Sequence
  Description of Artificial Sequence: Synthetic Linker
CPPCP

SEQ ID NO: 208827 - protein, 6 aa, Artificial Sequence
  Description of Artificial Sequence: Synthetic Linker
QPKAAP

SEQ ID NO: 208828 - protein, 25 aa, Artificial Sequence
  Description of Artificial Sequence: Synthetic Linker
PPPPPASSTTFSTTRRSSTTSSSPS

SEQ ID NO: 208829 - protein, 27 aa, Artificial Sequence
  Description of Artificial Sequence: Synthetic Linker
GGNPPGGNPPGTTTPRPATSTGSSPGP

SEQ ID NO: 208830 - protein, 33 aa, Artificial Sequence
  Description of Artificial Sequence: Synthetic Linker
GTSTGGSTTTTASGTTSTKASTTSTSSTSTGTG

SEQ ID NO: 208831 - protein, 33 aa, Artificial Sequence
  Description of Artificial Sequence: Synthetic Linker
TVSSSSVSSSHSSTSTSSSHSSSSTPPTQPTGV

SEQ ID NO: 208832 - protein, 34 aa, Artificial Sequence
  Description of Artificial Sequence: Synthetic Linker
GSSGTPPSNPSSSASPTSSTAKPSSTSTASNPSG

SEQ ID NO: 208833 - protein, 41 aa, Artificial Sequence
  Description of Artificial Sequence: Synthetic Linker
ASSSSSTRAASTTSRVSPTTSRSSSATPPPGSTTTRVPPVG

SEQ ID NO: 208834 - protein, 48 aa, Artificial Sequence
  Description of Artificial Sequence: Synthetic Linker
PSSGGTSSSSSAAPQSTSTKASTTTSAVRTTSTATTKTTSSAPAQGTN

SEQ ID NO: 208835 - protein, 6 aa, Artificial Sequence
  Description of Artificial Sequence: Synthetic Linker
ASTKGP

SEQ ID NO: 208836 - protein, 12 aa, Artificial Sequence
  Description of Artificial Sequence: Synthetic Linker
TVAAPSVFIFPP

SEQ ID NO: 208837 - protein, 13 aa, Artificial Sequence
  Description of Artificial Sequence: Synthetic Linker
ASTKGPSVFPLAP

SEQ ID NO: 208838 - protein, 13 aa, Artificial Sequence
  Description of Artificial Sequence: Synthetic Linker
QPKAAPSVTLFPP

SEQ ID NO: 208839 - protein, 5 aa, Artificial Sequence
  Description of Artificial Sequence: Synthetic Linker
RSANS

SEQ ID NO: 208840 - protein, 9 aa, Artificial Sequence
  Description of Artificial Sequence: Synthetic Linker
RPAKLALPP

SEQ ID NO: 208841 - protein, 17 aa, Artificial Sequence
  Description of Artificial Sequence: Synthetic Linker
SLHGFDLASEQHTVRDT

SEQ ID NO: 208842 - protein, 4 aa, Artificial Sequence
  Description of Artificial Sequence: Synthetic Linker
RARI

SEQ ID NO: 208843 - protein, 11 aa, Artificial Sequence
  Description of Artificial Sequence: Synthetic Linker
TKPQLGIREGM

SEQ ID NO: 208844 - protein, 21 aa, Artificial Sequence
  Description of Artificial Sequence: Synthetic Linker
HKPMAAPTTLKAGPLLSSEKL

SEQ ID NO: 208845 - protein, 12 aa, Artificial Sequence
  Description of Artificial Sequence: Synthetic Linker
SLPADRKPGEPV

SEQ ID NO: 208846 - protein, 6 aa, Artificial Sequence
  Description of Artificial Sequence: Synthetic Linker
RRHGEY

SEQ ID NO: 208847 - protein, 7 aa, Artificial Sequence
  Description of Artificial Sequence: Synthetic Linker
ANQNSAE

SEQ ID NO: 208848 - protein, 14 aa, Artificial Sequence
  Description of Artificial Sequence: Synthetic Linker
LTTNLTAFFREAHH

SEQ ID NO: 208849 - protein, 4 aa, Artificial Sequence
  Description of Artificial Sequence: Synthetic Linker
PNQR

SEQ ID NO: 208850 - protein, 5 aa, Artificial Sequence
  Description of Artificial Sequence: Synthetic Linker
ARNDP

SEQ ID NO: 208851 - protein, 5 aa, Artificial Sequence
  Description of Artificial Sequence: Synthetic Linker
LNWTR

SEQ ID NO: 208852 - protein, 6 aa, Artificial Sequence
  Description of Artificial Sequence: Synthetic Linker
DAATDR

SEQ ID NO: 208853 - protein, 6 aa, Artificial Sequence
  Description of Artificial Sequence: Synthetic Linker
DKASGA

SEQ ID NO: 208854 - protein, 6 aa, Artificial Sequence
  Description of Artificial Sequence: Synthetic Linker
GPNGNI

SEQ ID NO: 208855 - protein, 9 aa, Artificial Sequence
  Description of Artificial Sequence: Synthetic Linker
AWDNSDSSV

SEQ ID NO: 208856 - protein, 9 aa, Artificial Sequence
  Description of Artificial Sequence: Synthetic Linker
LAHVGRSLI

SEQ ID NO: 208857 - protein, 9 aa, Artificial Sequence
  Description of Artificial Sequence: Synthetic Linker
TKNPQRGTF

SEQ ID NO: 208858 - protein, 11 aa, Artificial Sequence
  Description of Artificial Sequence: Synthetic Linker
APMPAGLETWV

SEQ ID NO: 208859 - protein, 16 aa, Artificial Sequence
  Description of Artificial Sequence: Synthetic Linker
DTGTLPNLNSEVGAGW

SEQ ID NO: 208860 - protein, 18 aa, Artificial Sequence
  Description of Artificial Sequence: Synthetic Linker
ANHMWNPTGAHQSSIPAL

SEQ ID NO: 208861 - protein, 4 aa, Artificial Sequence
  Description of Artificial Sequence: Synthetic Linker
DATE

SEQ ID NO: 208862 - protein, 7 aa, Artificial Sequence
  Description of Artificial Sequence: Synthetic Linker
RNYLINS

SEQ ID NO: 208863 - protein, 14 aa, Artificial Sequence
  Description of Artificial Sequence: Synthetic Linker
SSPKNLDDKVKLSE

SEQ ID NO: 208864 - protein, 5 aa, Artificial Sequence
  Description of Artificial Sequence: Synthetic Linker
QYQIV

SEQ ID NO: 208865 - protein, 8 aa, Artificial Sequence
  Description of Artificial Sequence: Synthetic Linker
RWLKNASP

SEQ ID NO: 208866 - protein, 14 aa, Artificial Sequence
  Description of Artificial Sequence: Synthetic Linker
NILNDRNPVVTEDV

SEQ ID NO: 208867 - protein, 5 aa, Artificial Sequence
  Description of Artificial Sequence: Synthetic Linker
YTPGE

SEQ ID NO: 208868 - protein, 4 aa, Artificial Sequence
  Description of Artificial Sequence: Synthetic Linker
FGTQ

SEQ ID NO: 208869 - protein, 6 aa, Artificial Sequence
  Description of Artificial Sequence: Synthetic Linker
SLQSGY

SEQ ID NO: 208870 - protein, 6 aa, Artificial Sequence
  Description of Artificial Sequence: Synthetic Linker
TIPANR

SEQ ID NO: 208871 - protein, 9 aa, Artificial Sequence
  Description of Artificial Sequence: Synthetic Linker
KSEKGRNKF

SEQ ID NO: 208872 - protein, 7 aa, Artificial Sequence
  Description of Artificial Sequence: Synthetic Linker
YFNKYSS

SEQ ID NO: 208873 - protein, 8 aa, Artificial Sequence
  Description of Artificial Sequence: Synthetic Linker
YRNPSRNI

SEQ ID NO: 208874 - protein, 4 aa, Artificial Sequence
  Description of Artificial Sequence: Synthetic Linker
YGLN

SEQ ID NO: 208875 - protein, 5 aa, Artificial Sequence
  Description of Artificial Sequence: Synthetic Linker
IMGSV

SEQ ID NO: 208876 - protein, 5 aa, Artificial Sequence
  Description of Artificial Sequence: Synthetic Linker
SGRDA

SEQ ID NO: 208877 - protein, 6 aa, Artificial Sequence
  Description of Artificial Sequence: Synthetic Linker
LIEKGG

SEQ ID NO: 208878 - protein, 7 aa, Artificial Sequence
  Description of Artificial Sequence: Synthetic Linker
DINNISP

SEQ ID NO: 208879 - protein, 7 aa, Artificial Sequence
  Description of Artificial Sequence: Synthetic Linker
GRHVRGI

SEQ ID NO: 208880 - protein, 8 aa, Artificial Sequence
  Description of Artificial Sequence: Synthetic Linker
VRGREPGD

SEQ ID NO: 208881 - protein, 6 aa, Artificial Sequence
  Description of Artificial Sequence: Synthetic Linker
EMEIPE

SEQ ID NO: 208882 - protein, 6 aa, Artificial Sequence
  Description of Artificial Sequence: Synthetic Linker
RMIKSA

SEQ ID NO: 208883 - protein, 4 aa, Artificial Sequence
  Description of Artificial Sequence: Synthetic Linker
GFTP

SEQ ID NO: 208884 - protein, 5 aa, Artificial Sequence
  Description of Artificial Sequence: Synthetic Linker
FKIDV

SEQ ID NO: 208885 - protein, 5 aa, Artificial Sequence
  Description of Artificial Sequence: Synthetic Linker
NLDDP

SEQ ID NO: 208886 - protein, 11 aa, Artificial Sequence
  Description of Artificial Sequence: Synthetic Linker
LQNQQDNRGNI

SEQ ID NO: 208887 - protein, 19 aa, Artificial Sequence
  Description of Artificial Sequence: Synthetic Linker
NPQGQVWIEGREQQPQKNI

SEQ ID NO: 208888 - protein, 35 aa, Artificial Sequence
  Description of Artificial Sequence: Synthetic Linker
RVQGPFSVIRPPLRSQRPQEEVNGLEETICSARCT

SEQ ID NO: 208889 - protein, 53 aa, Artificial Sequence
  Description of Artificial Sequence: Synthetic Linker
DSSVFQPGGGSPFGEGQGQGQQGQGQGHQGQGQGQQGQQGQQGQQSQGQGFRD

SEQ ID NO: 208890 - protein, 5 aa, Artificial Sequence
  Description of Artificial Sequence: Synthetic Linker
CEGSD

SEQ ID NO: 208891 - protein, 7 aa, Artificial Sequence
  Description of Artificial Sequence: Synthetic Linker
VQQQETI

SEQ ID NO: 208892 - protein, 8 aa, Artificial Sequence
  Description of Artificial Sequence: Synthetic Linker
KGINSKKT

SEQ ID NO: 208893 - protein, 12 aa, Artificial Sequence
  Description of Artificial Sequence: Synthetic Linker
RLKLEDRQVDLT

SEQ ID NO: 208894 - protein, 8 aa, Artificial Sequence
  Description of Artificial Sequence: Synthetic Linker
TDSTQIKM

SEQ ID NO: 208895 - protein, 11 aa, Artificial Sequence
  Description of Artificial Sequence: Synthetic Linker
ILLQYNTEDAY

SEQ ID NO: 208896 - protein, 14 aa, Artificial Sequence
  Description of Artificial Sequence: Synthetic Linker
ELVTNCFKNRYTLQ

SEQ ID NO: 208897 - protein, 23 aa, Artificial Sequence
  Description of Artificial Sequence: Synthetic Linker
IKLYLGYKNKKLRVNINVPMKTE

SEQ ID NO: 208898 - protein, 24 aa, Artificial Sequence
  Description of Artificial Sequence: Synthetic Linker
KSKLLVLEDENANVDEVELKPDTL

SEQ ID NO: 208899 - protein, 11 aa, Artificial Sequence
  Description of Artificial Sequence: Synthetic Linker
VLTFDLAAPTV

SEQ ID NO: 208900 - protein, 27 aa, Artificial Sequence
  Description of Artificial Sequence: Synthetic Linker
CPAGNFIGKTATPYTSGTPCGDCPSDC

SEQ ID NO: 208901 - protein, 8 aa, Artificial Sequence
  Description of Artificial Sequence: Synthetic Linker
HLPGREAH

SEQ ID NO: 208902 - protein, 8 aa, Artificial Sequence
  Description of Artificial Sequence: Synthetic Linker
YLPDAFGP

SEQ ID NO: 208903 - protein, 21 aa, Artificial Sequence
  Description of Artificial Sequence: Synthetic Linker
LEIKTLLMDEQDHGYALTGDA

SEQ ID NO: 208904 - protein, 7 aa, Artificial Sequence
  Description of Artificial Sequence: Synthetic Linker
VLAMAKV

SEQ ID NO: 208905 - protein, 4 aa, Artificial Sequence
  Description of Artificial Sequence: Synthetic Linker
FAFG

SEQ ID NO: 208906 - protein, 4 aa, Artificial Sequence
  Description of Artificial Sequence: Synthetic Linker
GPNQ

SEQ ID NO: 208907 - protein, 8 aa, Artificial Sequence
  Description of Artificial Sequence: Synthetic Linker
DEINNPSL

SEQ ID NO: 208908 - protein, 24 aa, Artificial Sequence
  Description of Artificial Sequence: Synthetic Linker
VIPAGKLERVDPTTVRQEGPWADP

SEQ ID NO: 208909 - protein, 15 aa, Artificial Sequence
  Description of Artificial Sequence: Synthetic Linker
LGVSSSEVSRVEADS

SEQ ID NO: 208910 - protein, 6 aa, Artificial Sequence
  Description of Artificial Sequence: Synthetic Linker
AIPDFG

SEQ ID NO: 208911 - protein, 6 aa, Artificial Sequence
  Description of Artificial Sequence: Synthetic Linker
VDPAYR

SEQ ID NO: 208912 - protein, 6 aa, Artificial Sequence
  Description of Artificial Sequence: Synthetic Linker
YAPSSP

SEQ ID NO: 208913 - protein, 23 aa, Artificial Sequence
  Description of Artificial Sequence: Synthetic Linker
ATPQMEEDKGPINHPQYPGDVGL

SEQ ID NO: 208914 - protein, 6 aa, Artificial Sequence
  Description of Artificial Sequence: Synthetic Linker
RTDIQT

SEQ ID NO: 208915 - protein, 13 aa, Artificial Sequence
  Description of Artificial Sequence: Synthetic Linker
KIPFTANKFEKNY

SEQ ID NO: 208916 - protein, 3 aa, Artificial Sequence
  Description of Artificial Sequence: Synthetic Linker
SGC

SEQ ID NO: 208917 - protein, 10 aa, Artificial Sequence
  Description of Artificial Sequence: Synthetic Linker
LEGDKNALNQ

SEQ ID NO: 208918 - protein, 4 aa, Artificial Sequence
  Description of Artificial Sequence: Synthetic Linker
AGGD

SEQ ID NO: 208919 - protein, 4 aa, Artificial Sequence
  Description of Artificial Sequence: Synthetic Linker
KADV

SEQ ID NO: 208920 - protein, 4 aa, Artificial Sequence
  Description of Artificial Sequence: Synthetic Linker
KGGR

SEQ ID NO: 208921 - protein, 4 aa, Artificial Sequence
  Description of Artificial Sequence: Synthetic Linker
LGTF

SEQ ID NO: 208922 - protein, 4 aa, Artificial Sequence
  Description of Artificial Sequence: Synthetic Linker
LPFL

SEQ ID NO: 208923 - protein, 4 aa, Artificial Sequence
  Description of Artificial Sequence: Synthetic Linker
QKGK

SEQ ID NO: 208924 - protein, 5 aa, Artificial Sequence
  Description of Artificial Sequence: Synthetic Linker
EEKCE

SEQ ID NO: 208925 - protein, 5 aa, Artificial Sequence
  Description of Artificial Sequence: Synthetic Linker
LGAGD

SEQ ID NO: 208926 - protein, 5 aa, Artificial Sequence
  Description of Artificial Sequence: Synthetic Linker
LKSIE

SEQ ID NO: 208927 - protein, 5 aa, Artificial Sequence
  Description of Artificial Sequence: Synthetic Linker
PKTDD

SEQ ID NO: 208928 - protein, 5 aa, Artificial Sequence
  Description of Artificial Sequence: Synthetic Linker
SAFGS

SEQ ID NO: 208929 - protein, 5 aa, Artificial Sequence
  Description of Artificial Sequence: Synthetic Linker
VLRDP

SEQ ID NO: 208930 - protein, 6 aa, Artificial Sequence
  Description of Artificial Sequence: Synthetic Linker
EEGYKA

SEQ ID NO: 208931 - protein, 6 aa, Artificial Sequence
  Description of Artificial Sequence: Synthetic Linker
KDLGVK

SEQ ID NO: 208932 - protein, 6 aa, Artificial Sequence
  Description of Artificial Sequence: Synthetic Linker
LVDISV

SEQ ID NO: 208933 - protein, 6 aa, Artificial Sequence
  Description of Artificial Sequence: Synthetic Linker
NIRAVP

SEQ ID NO: 208934 - protein, 6 aa, Artificial Sequence
  Description of Artificial Sequence: Synthetic Linker
RCGARR

SEQ ID NO: 208935 - protein, 6 aa, Artificial Sequence
  Description of Artificial Sequence: Synthetic Linker
VFRKGF

SEQ ID NO: 208936 - protein, 6 aa, Artificial Sequence
  Description of Artificial Sequence: Synthetic Linker
VIGKAL

SEQ ID NO: 208937 - protein, 7 aa, Artificial Sequence
  Description of Artificial Sequence: Synthetic Linker
IGIGLPE

SEQ ID NO: 208938 - protein, 7 aa, Artificial Sequence
  Description of Artificial Sequence: Synthetic Linker
QDETGKW

SEQ ID NO: 208939 - protein, 7 aa, Artificial Sequence
  Description of Artificial Sequence: Synthetic Linker
VGMANTT

SEQ ID NO: 208940 - protein, 8 aa, Artificial Sequence
  Description of Artificial Sequence: Synthetic Linker
ELSNIEQV

SEQ ID NO: 208941 - protein, 10 aa, Artificial Sequence
  Description of Artificial Sequence: Synthetic Linker
FQGLTQDQGF

SEQ ID NO: 208942 - protein, 12 aa, Artificial Sequence
  Description of Artificial Sequence: Synthetic Linker
CGKSLSENEITL

SEQ ID NO: 208943 - protein, 14 aa, Artificial Sequence
  Description of Artificial Sequence: Synthetic Linker
LQGWDGQSPGTESH

SEQ ID NO: 208944 - protein, 17 aa, Artificial Sequence
  Description of Artificial Sequence: Synthetic Linker
PVPRIAELMGKKLPNFG

SEQ ID NO: 208945 - protein, 18 aa, Artificial Sequence
  Description of Artificial Sequence: Synthetic Linker
QYGASVSAKPELPLFYTP

SEQ ID NO: 208946 - protein, 18 aa, Artificial Sequence
  Description of Artificial Sequence: Synthetic Linker
SKAGMCACHSPLPSIRGA

SEQ ID NO: 208947 - protein, 23 aa, Artificial Sequence
  Description of Artificial Sequence: Synthetic Linker
EQNAAFPPLERKPFIPKKPIPAI

SEQ ID NO: 208948 - protein, 28 aa, Artificial Sequence
  Description of Artificial Sequence: Synthetic Linker
EALSPIKFNRWDLPEVDPETMQTSEPWV

SEQ ID NO: 208949 - protein, 7 aa, Artificial Sequence
  Description of Artificial Sequence: Synthetic Linker
NTGSGKR

SEQ ID NO: 208950 - protein, 7 aa, Artificial Sequence
  Description of Artificial Sequence: Synthetic Linker
TQPVQSS

SEQ ID NO: 208951 - protein, 7 aa, Artificial Sequence
  Description of Artificial Sequence: Synthetic Linker
YTGDNCA

SEQ ID NO: 208952 - protein, 18 aa, Artificial Sequence
  Description of Artificial Sequence: Synthetic Linker
LPRDGLKDPQGKPLHYDR

SEQ ID NO: 208953 - protein, 7 aa, Artificial Sequence
  Description of Artificial Sequence: Synthetic Linker
DDDRIKD

SEQ ID NO: 208954 - protein, 7 aa, Artificial Sequence
  Description of Artificial Sequence: Synthetic Linker
EAEKNQQ

SEQ ID NO: 208955 - protein, 11 aa, Artificial Sequence
  Description of Artificial Sequence: Synthetic Linker
NHLGIDLGETP

SEQ ID NO: 208956 - protein, 13 aa, Artificial Sequence
  Description of Artificial Sequence: Synthetic Linker
RLFESSGCAGKLA

SEQ ID NO: 208957 - protein, 13 aa, Artificial Sequence
  Description of Artificial Sequence: Synthetic Linker
VRHDGRHAHDYDY

SEQ ID NO: 208958 - protein, 15 aa, Artificial Sequence
  Description of Artificial Sequence: Synthetic Linker
RDIEADTPARYNADP

SEQ ID NO: 208959 - protein, 4 aa, Artificial Sequence
  Description of Artificial Sequence: Synthetic Linker
LSSR

SEQ ID NO: 208960 - protein, 4 aa, Artificial Sequence
  Description of Artificial Sequence: Synthetic Linker
SILM

SEQ ID NO: 208961 - protein, 5 aa, Artificial Sequence
  Description of Artificial Sequence: Synthetic Linker
DTSGG

SEQ ID NO: 208962 - protein, 5 aa, Artificial Sequence
  Description of Artificial Sequence: Synthetic Linker
LGDGA

SEQ ID NO: 208963 - protein, 6 aa, Artificial Sequence
  Description of Artificial Sequence: Synthetic Linker
ANNSTL

SEQ ID NO: 208964 - protein, 6 aa, Artificial Sequence
  Description of Artificial Sequence: Synthetic Linker
IDEIQK

SEQ ID NO: 208965 - protein, 6 aa, Artificial Sequence
  Description of Artificial Sequence: Synthetic Linker
KLPSFE

SEQ ID NO: 208966 - protein, 6 aa, Artificial Sequence
  Description of Artificial Sequence: Synthetic Linker
QEVSQC

SEQ ID NO: 208967 - protein, 6 aa, Artificial Sequence
  Description of Artificial Sequence: Synthetic Linker
RSLSTT

SEQ ID NO: 208968 - protein, 6 aa, Artificial Sequence
  Description of Artificial Sequence: Synthetic Linker
SSNHKL

SEQ ID NO: 208969 - protein, 6 aa, Artificial Sequence
  Description of Artificial Sequence: Synthetic Linker
TFESSH

SEQ ID NO: 208970 - protein, 7 aa, Artificial Sequence
  Description of Artificial Sequence: Synthetic Linker
TALRPSA

SEQ ID NO: 208971 - protein, 8 aa, Artificial Sequence
  Description of Artificial Sequence: Synthetic Linker
PLYESPRK

SEQ ID NO: 208972 - protein, 9 aa, Artificial Sequence
  Description of Artificial Sequence: Synthetic Linker
LNSDGYPDS

SEQ ID NO: 208973 - protein, 9 aa, Artificial Sequence
  Description of Artificial Sequence: Synthetic Linker
LWTDISARI

SEQ ID NO: 208974 - protein, 11 aa, Artificial Sequence
  Description of Artificial Sequence: Synthetic Linker
HKEMLGGEIIP

SEQ ID NO: 208975 - protein, 12 aa, Artificial Sequence
  Description of Artificial Sequence: Synthetic Linker
TLGTQPTVLRTF

SEQ ID NO: 208976 - protein, 12 aa, Artificial Sequence
  Description of Artificial Sequence: Synthetic Linker
VFSNVNLKEVNY

SEQ ID NO: 208977 - protein, 13 aa, Artificial Sequence
  Description of Artificial Sequence: Synthetic Linker
NVFACSDRPTVIY

SEQ ID NO: 208978 - protein, 14 aa, Artificial Sequence
  Description of Artificial Sequence: Synthetic Linker
DITPLGDSNGLSPL

SEQ ID NO: 208979 - protein, 14 aa, Artificial Sequence
  Description of Artificial Sequence: Synthetic Linker
FGLNIETGLLSDRK

SEQ ID NO: 208980 - protein, 29 aa, Artificial Sequence
  Description of Artificial Sequence: Synthetic Linker
TQALSSSVSSSKLFSSSTAPHETSFGEEV

SEQ ID NO: 208981 - protein, 4 aa, Artificial Sequence
  Description of Artificial Sequence: Synthetic Linker
EHGV

SEQ ID NO: 208982 - protein, 4 aa, Artificial Sequence
  Description of Artificial Sequence: Synthetic Linker
REGK

SEQ ID NO: 208983 - protein, 5 aa, Artificial Sequence
  Description of Artificial Sequence: Synthetic Linker
TVLHA

SEQ ID NO: 208984 - protein, 6 aa, Artificial Sequence
  Description of Artificial Sequence: Synthetic Linker
ETEKTG

SEQ ID NO: 208985 - protein, 6 aa, Artificial Sequence
  Description of Artificial Sequence: Synthetic Linker
FHYEGG

SEQ ID NO: 208986 - protein, 6 aa, Artificial Sequence
  Description of Artificial Sequence: Synthetic Linker
LDSGVS

SEQ ID NO: 208987 - protein, 6 aa, Artificial Sequence
  Description of Artificial Sequence: Synthetic Linker
PQAPLA

SEQ ID NO: 208988 - protein, 7 aa, Artificial Sequence
  Description of Artificial Sequence: Synthetic Linker
DKRDGKE

SEQ ID NO: 208989 - protein, 8 aa, Artificial Sequence
  Description of Artificial Sequence: Synthetic Linker
IHPEEGVS

SEQ ID NO: 208990 - protein, 14 aa, Artificial Sequence
  Description of Artificial Sequence: Synthetic Linker
PSLETFTNVTEFEY

SEQ ID NO: 208991 - protein, 19 aa, Artificial Sequence
  Description of Artificial Sequence: Synthetic Linker
GGKFDDNSYKVSGGLHGVG

SEQ ID NO: 208992 - protein, 5 aa, Artificial Sequence
  Description of Artificial Sequence: Synthetic Linker
MKPEN

SEQ ID NO: 208993 - protein, 6 aa, Artificial Sequence
  Description of Artificial Sequence: Synthetic Linker
TNISRA

SEQ ID NO: 208994 - protein, 7 aa, Artificial Sequence
  Description of Artificial Sequence: Synthetic Linker
LLESGRL

SEQ ID NO: 208995 - protein, 15 aa, Artificial Sequence
  Description of Artificial Sequence: Synthetic Linker
VWGTKGLANEGKVIG

SEQ ID NO: 208996 - protein, 28 aa, Artificial Sequence
  Description of Artificial Sequence: Synthetic Linker
TLSQWGFFSPYGIGDNDACTINPYDGWA

SEQ ID NO: 208997 - protein, 4 aa, Artificial Sequence
  Description of Artificial Sequence: Synthetic Linker
MERE

SEQ ID NO: 208998 - protein, 7 aa, Artificial Sequence
  Description of Artificial Sequence: Synthetic Linker
FIDKPGI

SEQ ID NO: 208999 - protein, 8 aa, Artificial Sequence
  Description of Artificial Sequence: Synthetic Linker
TLNYTCPT

SEQ ID NO: 209000 - protein, 10 aa, Artificial Sequence
  Description of Artificial Sequence: Synthetic Linker
LLQERQDNLL

SEQ ID NO: 209001 - protein, 12 aa, Artificial Sequence
  Description of Artificial Sequence: Synthetic Linker
QRTTLPHIRSIT

SEQ ID NO: 209002 - protein, 4 aa, Artificial Sequence
  Description of Artificial Sequence: Synthetic Linker
VGGF

SEQ ID NO: 209003 - protein, 5 aa, Artificial Sequence
  Description of Artificial Sequence: Synthetic Linker
AKIQI

SEQ ID NO: 209004 - protein, 5 aa, Artificial Sequence
  Description of Artificial Sequence: Synthetic Linker
KEQNK

SEQ ID NO: 209005 - protein, 7 aa, Artificial Sequence
  Description of Artificial Sequence: Synthetic Linker
PGPKCPF

SEQ ID NO: 209006 - protein, 9 aa, Artificial Sequence
  Description of Artificial Sequence: Synthetic Linker
QLNYISIAS

SEQ ID NO: 209007 - protein, 9 aa, Artificial Sequence
  Description of Artificial Sequence: Synthetic Linker
SANNIAKYD

SEQ ID NO: 209008 - protein, 16 aa, Artificial Sequence
  Description of Artificial Sequence: Synthetic Linker
AIKGNIDAPQVVEGEK

SEQ ID NO: 209009 - protein, 18 aa, Artificial Sequence
  Description of Artificial Sequence: Synthetic Linker
VIPQGRSHPVQPYPGAFV

SEQ ID NO: 209010 - protein, 4 aa, Artificial Sequence
  Description of Artificial Sequence: Synthetic Linker
ETSR

SEQ ID NO: 209011 - protein, 5 aa, Artificial Sequence
  Description of Artificial Sequence: Synthetic Linker
GVGRR

SEQ ID NO: 209012 - protein, 6 aa, Artificial Sequence
  Description of Artificial Sequence: Synthetic Linker
FFLGQI

SEQ ID NO: 209013 - protein, 6 aa, Artificial Sequence
  Description of Artificial Sequence: Synthetic Linker
LEGSSL

SEQ ID NO: 209014 - protein, 8 aa, Artificial Sequence
  Description of Artificial Sequence: Synthetic Linker
DLSQVNEL

SEQ ID NO: 209015 - protein, 8 aa, Artificial Sequence
  Description of Artificial Sequence: Synthetic Linker
KNANGDYF

SEQ ID NO: 209016 - protein, 11 aa, Artificial Sequence
  Description of Artificial Sequence: Synthetic Linker
ILPLPYPNSPV

SEQ ID NO: 209017 - protein, 12 aa, Artificial Sequence
  Description of Artificial Sequence: Synthetic Linker
FADPTIQSQSEI

SEQ ID NO: 209018 - protein, 13 aa, Artificial Sequence
  Description of Artificial Sequence: Synthetic Linker
CGPYFANDNFSLE

SEQ ID NO: 209019 - protein, 15 aa, Artificial Sequence
  Description of Artificial Sequence: Synthetic Linker
PDSPTYDKFLNPESL

SEQ ID NO: 209020 - protein, 4 aa, Artificial Sequence
  Description of Artificial Sequence: Synthetic Linker
TGDL

SEQ ID NO: 209021 - protein, 6 aa, Artificial Sequence
  Description of Artificial Sequence: Synthetic Linker
FDNEYE

SEQ ID NO: 209022 - protein, 7 aa, Artificial Sequence
  Description of Artificial Sequence: Synthetic Linker
SLKFEGD

SEQ ID NO: 209023 - protein, 13 aa, Artificial Sequence
  Description of Artificial Sequence: Synthetic Linker
VFNPEGRDLITDW

SEQ ID NO: 209024 - protein, 15 aa, Artificial Sequence
  Description of Artificial Sequence: Synthetic Linker
GGNYDINSHLPLIPE

SEQ ID NO: 209025 - protein, 5 aa, Artificial Sequence
  Description of Artificial Sequence: Synthetic Linker
RNEQD

SEQ ID NO: 209026 - protein, 4 aa, Artificial Sequence
  Description of Artificial Sequence: Synthetic Linker
KEGK

SEQ ID NO: 209027 - protein, 5 aa, Artificial Sequence
  Description of Artificial Sequence: Synthetic Linker
MEQAM

SEQ ID NO: 209028 - protein, 6 aa, Artificial Sequence
  Description of Artificial Sequence: Synthetic Linker
ILRVNV

SEQ ID NO: 209029 - protein, 7 aa, Artificial Sequence
  Description of Artificial Sequence: Synthetic Linker
LPDGEDP

SEQ ID NO: 209030 - protein, 7 aa, Artificial Sequence
  Description of Artificial Sequence: Synthetic Linker
LSIGIRR

SEQ ID NO: 209031 - protein, 8 aa, Artificial Sequence
  Description of Artificial Sequence: Synthetic Linker
DNAEPNRL

SEQ ID NO: 209032 - protein, 17 aa, Artificial Sequence
  Description of Artificial Sequence: Synthetic Linker
GFVRKAILASFPEGVGI

SEQ ID NO: 209033 - protein, 4 aa, Artificial Sequence
  Description of Artificial Sequence: Synthetic Linker
VDGV

SEQ ID NO: 209034 - protein, 5 aa, Artificial Sequence
  Description of Artificial Sequence: Synthetic Linker
LWNGG

SEQ ID NO: 209035 - protein, 5 aa, Artificial Sequence
  Description of Artificial Sequence: Synthetic Linker
RGISK

SEQ ID NO: 209036 - protein, 7 aa, Artificial Sequence
  Description of Artificial Sequence: Synthetic Linker
CYVCEKW

SEQ ID NO: 209037 - protein, 7 aa, Artificial Sequence
  Description of Artificial Sequence: Synthetic Linker
RDQNGNI

SEQ ID NO: 209038 - protein, 8 aa, Artificial Sequence
  Description of Artificial Sequence: Synthetic Linker
RDKDKNFK

SEQ ID NO: 209039 - protein, 8 aa, Artificial Sequence
  Description of Artificial Sequence: Synthetic Linker
TAGNEDTK

SEQ ID NO: 209040 - protein, 9 aa, Artificial Sequence
  Description of Artificial Sequence: Synthetic Linker
ESNGRYSAL

SEQ ID NO: 209041 - protein, 11 aa, Artificial Sequence
  Description of Artificial Sequence: Synthetic Linker
GSHKSDALFGK

SEQ ID NO: 209042 - protein, 18 aa, Artificial Sequence
  Description of Artificial Sequence: Synthetic Linker
SKRKPSGGKPGTYNVWNF

SEQ ID NO: 209043 - protein, 4 aa, Artificial Sequence
  Description of Artificial Sequence: Synthetic Linker
FYNM

SEQ ID NO: 209044 - protein, 4 aa, Artificial Sequence
  Description of Artificial Sequence: Synthetic Linker
KFTW

SEQ ID NO: 209045 - protein, 6 aa, Artificial Sequence
  Description of Artificial Sequence: Synthetic Linker
FITPII

SEQ ID NO: 209046 - protein, 6 aa, Artificial Sequence
  Description of Artificial Sequence: Synthetic Linker
FSKKKA

SEQ ID NO: 209047 - protein, 7 aa, Artificial Sequence
  Description of Artificial Sequence: Synthetic Linker
SNLDRHL

SEQ ID NO: 209048 - protein, 8 aa, Artificial Sequence
  Description of Artificial Sequence: Synthetic Linker
FHSLQGND

SEQ ID NO: 209049 - protein, 8 aa, Artificial Sequence
  Description of Artificial Sequence: Synthetic Linker
ITKPTKNT

SEQ ID NO: 209050 - protein, 10 aa, Artificial Sequence
  Description of Artificial Sequence: Synthetic Linker
YYKGLGTSLA

SEQ ID NO: 209051 - protein, 14 aa, Artificial Sequence
  Description of Artificial Sequence: Synthetic Linker
QYEPGTVLDPTLKE

SEQ ID NO: 209052 - protein, 6 aa, Artificial Sequence
  Description of Artificial Sequence: Synthetic Linker
LNPSSR

SEQ ID NO: 209053 - protein, 8 aa, Artificial Sequence
  Description of Artificial Sequence: Synthetic Linker
QRAPPKTF

SEQ ID NO: 209054 - protein, 12 aa, Artificial Sequence
  Description of Artificial Sequence: Synthetic Linker
ADAKVMKDAKTK

SEQ ID NO: 209055 - protein, 4 aa, Artificial Sequence
  Description of Artificial Sequence: Synthetic Linker
LNGN

SEQ ID NO: 209056 - protein, 5 aa, Artificial Sequence
  Description of Artificial Sequence: Synthetic Linker
AGEME

SEQ ID NO: 209057 - protein, 6 aa, Artificial Sequence
  Description of Artificial Sequence: Synthetic Linker
MDNMGR

SEQ ID NO: 209058 - protein, 6 aa, Artificial Sequence
  Description of Artificial Sequence: Synthetic Linker
SREYKK

SEQ ID NO: 209059 - protein, 6 aa, Artificial Sequence
  Description of Artificial Sequence: Synthetic Linker
STKDVK

SEQ ID NO: 209060 - protein, 7 aa, Artificial Sequence
  Description of Artificial Sequence: Synthetic Linker
KLPVKGF

SEQ ID NO: 209061 - protein, 7 aa, Artificial Sequence
  Description of Artificial Sequence: Synthetic Linker
PFNGEDY

SEQ ID NO: 209062 - protein, 8 aa, Artificial Sequence
  Description of Artificial Sequence: Synthetic Linker
FKMQSLDK

SEQ ID NO: 209063 - protein, 4 aa, Artificial Sequence
  Description of Artificial Sequence: Synthetic Linker
TPEG

SEQ ID NO: 209064 - protein, 5 aa, Artificial Sequence
  Description of Artificial Sequence: Synthetic Linker
VGPLK

SEQ ID NO: 209065 - protein, 6 aa, Artificial Sequence
  Description of Artificial Sequence: Synthetic Linker
ETDADF

SEQ ID NO: 209066 - protein, 8 aa, Artificial Sequence
  Description of Artificial Sequence: Synthetic Linker
IPEEDGSS

SEQ ID NO: 209067 - protein, 9 aa, Artificial Sequence
  Description of Artificial Sequence: Synthetic Linker
DCTKLGTGA

SEQ ID NO: 209068 - protein, 10 aa, Artificial Sequence
  Description of Artificial Sequence: Synthetic Linker
NIPNDVTKLN

SEQ ID NO: 209069 - protein, 15 aa, Artificial Sequence
  Description of Artificial Sequence: Synthetic Linker
GAARPGLRLPGCVDA

SEQ ID NO: 209070 - protein, 12 aa, Artificial Sequence
  Description of Artificial Sequence: Synthetic Linker
RLRRNDDEPAEM

SEQ ID NO: 209071 - protein, 4 aa, Artificial Sequence
  Description of Artificial Sequence: Synthetic Linker
LDQR

SEQ ID NO: 209072 - protein, 5 aa, Artificial Sequence
  Description of Artificial Sequence: Synthetic Linker
VDGNR

SEQ ID NO: 209073 - protein, 6 aa, Artificial Sequence
  Description of Artificial Sequence: Synthetic Linker
PLRRFY

SEQ ID NO: 209074 - protein, 6 aa, Artificial Sequence
  Description of Artificial Sequence: Synthetic Linker
YAEEDG

SEQ ID NO: 209075 - protein, 6 aa, Artificial Sequence
  Description of Artificial Sequence: Synthetic Linker
YEDGRL

SEQ ID NO: 209076 - protein, 7 aa, Artificial Sequence
  Description of Artificial Sequence: Synthetic Linker
RSNQGTA

SEQ ID NO: 209077 - protein, 10 aa, Artificial Sequence
  Description of Artificial Sequence: Synthetic Linker
DGPASENGFL

SEQ ID NO: 209078 - protein, 14 aa, Artificial Sequence
  Description of Artificial Sequence: Synthetic Linker
PRVVVGQRVRKGDL

SEQ ID NO: 209079 - protein, 16 aa, Artificial Sequence
  Description of Artificial Sequence: Synthetic Linker
ELITNIGETAGVVQDI

SEQ ID NO: 209080 - protein, 20 aa, Artificial Sequence
  Description of Artificial Sequence: Synthetic Linker
SDPTLPRSDRECPKCHSREN

SEQ ID NO: 209081 - protein, 5 aa, Artificial Sequence
  Description of Artificial Sequence: Synthetic Linker
VEGEV

SEQ ID NO: 209082 - protein, 8 aa, Artificial Sequence
  Description of Artificial Sequence: Synthetic Linker
YVPVVQEV

SEQ ID NO: 209083 - protein, 4 aa, Artificial Sequence
  Description of Artificial Sequence: Synthetic Linker
YQNN

SEQ ID NO: 209084 - protein, 5 aa, Artificial Sequence
  Description of Artificial Sequence: Synthetic Linker
LVVNI

SEQ ID NO: 209085 - protein, 6 aa, Artificial Sequence
  Description of Artificial Sequence: Synthetic Linker
EKNFQT

SEQ ID NO: 209086 - protein, 11 aa, Artificial Sequence
  Description of Artificial Sequence: Synthetic Linker
MKLVPSIPPAT

SEQ ID NO: 209087 - protein, 14 aa, Artificial Sequence
  Description of Artificial Sequence: Synthetic Linker
TQPDVPFKNPDNVV

SEQ ID NO: 209088 - protein, 32 aa, Artificial Sequence
  Description of Artificial Sequence: Synthetic Linker
YPEDHNEPQSVRAASSDPGEVVPSACAADEPV

SEQ ID NO: 209089 - protein, 4 aa, Artificial Sequence
  Description of Artificial Sequence: Synthetic Linker
ALCL

SEQ ID NO: 209090 - protein, 4 aa, Artificial Sequence
  Description of Artificial Sequence: Synthetic Linker
LLSL

SEQ ID NO: 209091 - protein, 7 aa, Artificial Sequence
  Description of Artificial Sequence: Synthetic Linker
LNNVRFS

SEQ ID NO: 209092 - protein, 7 aa, Artificial Sequence
  Description of Artificial Sequence: Synthetic Linker
SLCKAHL

SEQ ID NO: 209093 - protein, 8 aa, Artificial Sequence
  Description of Artificial Sequence: Synthetic Linker
EHNNLVNV

SEQ ID NO: 209094 - protein, 8 aa, Artificial Sequence
  Description of Artificial Sequence: Synthetic Linker
YDTGRTGR

SEQ ID NO: 209095 - protein, 11 aa, Artificial Sequence
  Description of Artificial Sequence: Synthetic Linker
QHNLKQNDQPQ

SEQ ID NO: 209096 - protein, 11 aa, Artificial Sequence
  Description of Artificial Sequence: Synthetic Linker
LYPNAQTGHGH

SEQ ID NO: 209097 - protein, 13 aa, Artificial Sequence
  Description of Artificial Sequence: Synthetic Linker
AEVTYKHHEPTGC

SEQ ID NO: 209098 - protein, 4 aa, Artificial Sequence
  Description of Artificial Sequence: Synthetic Linker
MITP

SEQ ID NO: 209099 - protein, 8 aa, Artificial Sequence
  Description of Artificial Sequence: Synthetic Linker
LQHPKIIK

SEQ ID NO: 209100 - protein, 12 aa, Artificial Sequence
  Description of Artificial Sequence: Synthetic Linker
REDEEMGLTTTS

SEQ ID NO: 209101 - protein, 5 aa, Artificial Sequence
  Description of Artificial Sequence: Synthetic Linker
GSREE

SEQ ID NO: 209102 - protein, 4 aa, Artificial Sequence
  Description of Artificial Sequence: Synthetic Linker
ENTC

SEQ ID NO: 209103 - protein, 11 aa, Artificial Sequence
  Description of Artificial Sequence: Synthetic Linker
PVSGAKTFKNE

SEQ ID NO: 209104 - protein, 5 aa, Artificial Sequence
  Description of Artificial Sequence: Synthetic Linker
LSQDD

SEQ ID NO: 209105 - protein, 8 aa, Artificial Sequence
  Description of Artificial Sequence: Synthetic Linker
LLGADDDL

SEQ ID NO: 209106 - protein, 4 aa, Artificial Sequence
  Description of Artificial Sequence: Synthetic Linker
GHGE

SEQ ID NO: 209107 - protein, 4 aa, Artificial Sequence
  Description of Artificial Sequence: Synthetic Linker
PKGR

SEQ ID NO: 209108 - protein, 5 aa, Artificial Sequence
  Description of Artificial Sequence: Synthetic Linker
ALPSP

SEQ ID NO: 209109 - protein, 6 aa, Artificial Sequence
  Description of Artificial Sequence: Synthetic Linker
DYGVEV

SEQ ID NO: 209110 - protein, 6 aa, Artificial Sequence
  Description of Artificial Sequence: Synthetic Linker
EDPSLK

SEQ ID NO: 209111 - protein, 7 aa, Artificial Sequence
  Description of Artificial Sequence: Synthetic Linker
FGDGPPL

SEQ ID NO: 209112 - protein, 8 aa, Artificial Sequence
  Description of Artificial Sequence: Synthetic Linker
RQEETGEL

SEQ ID NO: 209113 - protein, 8 aa, Artificial Sequence
  Description of Artificial Sequence: Synthetic Linker
SVPKVPYR

SEQ ID NO: 209114 - protein, 8 aa, Artificial Sequence
  Description of Artificial Sequence: Synthetic Linker
WQGEKPES

SEQ ID NO: 209115 - protein, 12 aa, Artificial Sequence
  Description of Artificial Sequence: Synthetic Linker
EVPFARLPDPNV

SEQ ID NO: 209116 - protein, 4 aa, Artificial Sequence
  Description of Artificial Sequence: Synthetic Linker
DIYV

SEQ ID NO: 209117 - protein, 6 aa, Artificial Sequence
  Description of Artificial Sequence: Synthetic Linker
IGENIN

SEQ ID NO: 209118 - protein, 7 aa, Artificial Sequence
  Description of Artificial Sequence: Synthetic Linker
AGKITDV

SEQ ID NO: 209119 - protein, 8 aa, Artificial Sequence
  Description of Artificial Sequence: Synthetic Linker
KAGNVAAD

SEQ ID NO: 209120 - protein, 14 aa, Artificial Sequence
  Description of Artificial Sequence: Synthetic Linker
YIPVPTRDLEKPFL

SEQ ID NO: 209121 - protein, 4 aa, Artificial Sequence
  Description of Artificial Sequence: Synthetic Linker
GEHI

SEQ ID NO: 209122 - protein, 4 aa, Artificial Sequence
  Description of Artificial Sequence: Synthetic Linker
EGPE

SEQ ID NO: 209123 - protein, 4 aa, Artificial Sequence
  Description of Artificial Sequence: Synthetic Linker
FEWT

SEQ ID NO: 209124 - protein, 4 aa, Artificial Sequence
  Description of Artificial Sequence: Synthetic Linker
KATY

SEQ ID NO: 209125 - protein, 4 aa, Artificial Sequence
  Description of Artificial Sequence: Synthetic Linker
KDGV

SEQ ID NO: 209126 - protein, 4 aa, Artificial Sequence
  Description of Artificial Sequence: Synthetic Linker
LLGS

SEQ ID NO: 209127 - protein, 4 aa, Artificial Sequence
  Description of Artificial Sequence: Synthetic Linker
VSKS

SEQ ID NO: 209128 - protein, 7 aa, Artificial Sequence
  Description of Artificial Sequence: Synthetic Linker
KAPDGRI

SEQ ID NO: 209129 - protein, 8 aa, Artificial Sequence
  Description of Artificial Sequence: Synthetic Linker
RKASNKAY

SEQ ID NO: 209130 - protein, 10 aa, Artificial Sequence
  Description of Artificial Sequence: Synthetic Linker
YAPILYENDH

SEQ ID NO: 209131 - protein, 4 aa, Artificial Sequence
  Description of Artificial Sequence: Synthetic Linker
YSLG

SEQ ID NO: 209132 - protein, 6 aa, Artificial Sequence
  Description of Artificial Sequence: Synthetic Linker
LDPQWS

SEQ ID NO: 209133 - protein, 7 aa, Artificial Sequence
  Description of Artificial Sequence: Synthetic Linker
REGNGPT

SEQ ID NO: 209134 - protein, 7 aa, Artificial Sequence
  Description of Artificial Sequence: Synthetic Linker
RGEQVAF

SEQ ID NO: 209135 - protein, 8 aa, Artificial Sequence
  Description of Artificial Sequence: Synthetic Linker
QQPHGPYY

SEQ ID NO: 209136 - protein, 11 aa, Artificial Sequence
  Description of Artificial Sequence: Synthetic Linker
LDTWPPETQNW

SEQ ID NO: 209137 - protein, 13 aa, Artificial Sequence
  Description of Artificial Sequence: Synthetic Linker
CFHPASGFAWQFS

SEQ ID NO: 209138 - protein, 16 aa, Artificial Sequence
  Description of Artificial Sequence: Synthetic Linker
GIQSPRPNGPMQTAAN

SEQ ID NO: 209139 - protein, 17 aa, Artificial Sequence
  Description of Artificial Sequence: Synthetic Linker
IDAEEDSTRRMGFETIL

SEQ ID NO: 209140 - protein, 22 aa, Artificial Sequence
  Description of Artificial Sequence: Synthetic Linker
EMPDAPLQPGWDRPETPYSPPL

SEQ ID NO: 209141 - protein, 6 aa, Artificial Sequence
  Description of Artificial Sequence: Synthetic Linker
LLDAPV

SEQ ID NO: 209142 - protein, 5 aa, Artificial Sequence
  Description of Artificial Sequence: Synthetic Linker
EHIDL

SEQ ID NO: 209143 - protein, 5 aa, Artificial Sequence
  Description of Artificial Sequence: Synthetic Linker
FGCDK

SEQ ID NO: 209144 - protein, 7 aa, Artificial Sequence
  Description of Artificial Sequence: Synthetic Linker
CDCKHTT

SEQ ID NO: 209145 - protein, 9 aa, Artificial Sequence
  Description of Artificial Sequence: Synthetic Linker
LNGNDNTIK

SEQ ID NO: 209146 - protein, 10 aa, Artificial Sequence
  Description of Artificial Sequence: Synthetic Linker
ISENKNDAKV

SEQ ID NO: 209147 - protein, 8 aa, Artificial Sequence
  Description of Artificial Sequence: Synthetic Linker
TAACTNTS

SEQ ID NO: 209148 - protein, 4 aa, Artificial Sequence
  Description of Artificial Sequence: Synthetic Linker
LTLL

SEQ ID NO: 209149 - protein, 12 aa, Artificial Sequence
  Description of Artificial Sequence: Synthetic Linker
DWENWQNVGQWR

SEQ ID NO: 209150 - protein, 8 aa, Artificial Sequence
  Description of Artificial Sequence: Synthetic Linker
STKNPVHA

SEQ ID NO: 209151 - protein, 5 aa, Artificial Sequence
  Description of Artificial Sequence: Synthetic Linker
THRNK

SEQ ID NO: 209152 - protein, 12 aa, Artificial Sequence
  Description of Artificial Sequence: Synthetic Linker
IDHVLGVPYTTV

SEQ ID NO: 209153 - protein, 4 aa, Artificial Sequence
  Description of Artificial Sequence: Synthetic Linker
IDGR

SEQ ID NO: 209154 - protein, 4 aa, Artificial Sequence
  Description of Artificial Sequence: Synthetic Linker
KGTQ

SEQ ID NO: 209155 - protein, 5 aa, Artificial Sequence
  Description of Artificial Sequence: Synthetic Linker
ETIKG

SEQ ID NO: 209156 - protein, 6 aa, Artificial Sequence
  Description of Artificial Sequence: Synthetic Linker
ECSSES

SEQ ID NO: 209157 - protein, 7 aa, Artificial Sequence
  Description of Artificial Sequence: Synthetic Linker
LDPTKTI

SEQ ID NO: 209158 - protein, 8 aa, Artificial Sequence
  Description of Artificial Sequence: Synthetic Linker
SKPEAEET

SEQ ID NO: 209159 - protein, 10 aa, Artificial Sequence
  Description of Artificial Sequence: Synthetic Linker
ETAVTQTYGG

SEQ ID NO: 209160 - protein, 11 aa, Artificial Sequence
  Description of Artificial Sequence: Synthetic Linker
FCTDHTVLVQT

SEQ ID NO: 209161 - protein, 4 aa, Artificial Sequence
  Description of Artificial Sequence: Synthetic Linker
SGGT

SEQ ID NO: 209162 - protein, 6 aa, Artificial Sequence
  Description of Artificial Sequence: Synthetic Linker
FNENGI

SEQ ID NO: 209163 - protein, 6 aa, Artificial Sequence
  Description of Artificial Sequence: Synthetic Linker
SFLNSM

SEQ ID NO: 209164 - protein, 7 aa, Artificial Sequence
  Description of Artificial Sequence: Synthetic Linker
QNTGANN

SEQ ID NO: 209165 - protein, 9 aa, Artificial Sequence
  Description of Artificial Sequence: Synthetic Linker
QNGYKPGDL

SEQ ID NO: 209166 - protein, 12 aa, Artificial Sequence
  Description of Artificial Sequence: Synthetic Linker
TTGTINGATAAT

SEQ ID NO: 209167 - protein, 15 aa, Artificial Sequence
  Description of Artificial Sequence: Synthetic Linker
DSSDPAATAPTTAST

SEQ ID NO: 209168 - protein, 11 aa, Artificial Sequence
  Description of Artificial Sequence: Synthetic Linker
AEQPGGWKGWR

SEQ ID NO: 209169 - protein, 7 aa, Artificial Sequence
  Description of Artificial Sequence: Synthetic Linker
VYRFDKE

SEQ ID NO: 209170 - protein, 4 aa, Artificial Sequence
  Description of Artificial Sequence: Synthetic Linker
DAHG

SEQ ID NO: 209171 - protein, 4 aa, Artificial Sequence
  Description of Artificial Sequence: Synthetic Linker
KGAL

SEQ ID NO: 209172 - protein, 5 aa, Artificial Sequence
  Description of Artificial Sequence: Synthetic Linker
RGVEW

SEQ ID NO: 209173 - protein, 6 aa, Artificial Sequence
  Description of Artificial Sequence: Synthetic Linker
VTDHDW

SEQ ID NO: 209174 - protein, 7 aa, Artificial Sequence
  Description of Artificial Sequence: Synthetic Linker
SGLEVSE

SEQ ID NO: 209175 - protein, 8 aa, Artificial Sequence
  Description of Artificial Sequence: Synthetic Linker
LPLPLVPQ

SEQ ID NO: 209176 - protein, 8 aa, Artificial Sequence
  Description of Artificial Sequence: Synthetic Linker
VGEPEMPS

SEQ ID NO: 209177 - protein, 9 aa, Artificial Sequence
  Description of Artificial Sequence: Synthetic Linker
SAILPGRFQ

SEQ ID NO: 209178 - protein, 18 aa, Artificial Sequence
  Description of Artificial Sequence: Synthetic Linker
QGKCKKTCRDVFCPGSST

SEQ ID NO: 209179 - protein, 4 aa, Artificial Sequence
  Description of Artificial Sequence: Synthetic Linker
EEGL

SEQ ID NO: 209180 - protein, 4 aa, Artificial Sequence
  Description of Artificial Sequence: Synthetic Linker
FAGY

SEQ ID NO: 209181 - protein, 6 aa, Artificial Sequence
  Description of Artificial Sequence: Synthetic Linker
NKETRK

SEQ ID NO: 209182 - protein, 7 aa, Artificial Sequence
  Description of Artificial Sequence: Synthetic Linker
EKELYFK

SEQ ID NO: 209183 - protein, 7 aa, Artificial Sequence
  Description of Artificial Sequence: Synthetic Linker
FQGKIKG

SEQ ID NO: 209184 - protein, 7 aa, Artificial Sequence
  Description of Artificial Sequence: Synthetic Linker
MWPDADL

SEQ ID NO: 209185 - protein, 7 aa, Artificial Sequence
  Description of Artificial Sequence: Synthetic Linker
VGEGFAF

SEQ ID NO: 209186 - protein, 10 aa, Artificial Sequence
  Description of Artificial Sequence: Synthetic Linker
GTARASIPTY

SEQ ID NO: 209187 - protein, 13 aa, Artificial Sequence
  Description of Artificial Sequence: Synthetic Linker
FTPVSKDPQSANW

SEQ ID NO: 209188 - protein, 13 aa, Artificial Sequence
  Description of Artificial Sequence: Synthetic Linker
YLPKGEDGKDYSW

SEQ ID NO: 209189 - protein, 22 aa, Artificial Sequence
  Description of Artificial Sequence: Synthetic Linker
WGFERDENGNPKRDETLKHPRC

SEQ ID NO: 209190 - protein, 55 aa, Artificial Sequence
  Description of Artificial Sequence: Synthetic Linker
AYLYGPGREDGPLPEYYEPMECPVIEHPFSKTLHNPTALHFATEEKAVCDPRYPF

SEQ ID NO: 209191 - protein, 44 aa, Artificial Sequence
  Description of Artificial Sequence: Synthetic Linker
GRLFAINKMAEGPFPEHYEPIETPLGTNPLHPNVVSNPVVRLYE

SEQ ID NO: 209192 - protein, 4 aa, Artificial Sequence
  Description of Artificial Sequence: Synthetic Linker
AAQK

SEQ ID NO: 209193 - protein, 4 aa, Artificial Sequence
  Description of Artificial Sequence: Synthetic Linker
EDGL

SEQ ID NO: 209194 - protein, 4 aa, Artificial Sequence
  Description of Artificial Sequence: Synthetic Linker
FSGY

SEQ ID NO: 209195 - protein, 5 aa, Artificial Sequence
  Description of Artificial Sequence: Synthetic Linker
TNASL

SEQ ID NO: 209196 - protein, 6 aa, Artificial Sequence
  Description of Artificial Sequence: Synthetic Linker
DAEKRQ

SEQ ID NO: 209197 - protein, 7 aa, Artificial Sequence
  Description of Artificial Sequence: Synthetic Linker
DEGKVTG

SEQ ID NO: 209198 - protein, 7 aa, Artificial Sequence
  Description of Artificial Sequence: Synthetic Linker
ENNKINA

SEQ ID NO: 209199 - protein, 7 aa, Artificial Sequence
  Description of Artificial Sequence: Synthetic Linker
VRDDFAF

SEQ ID NO: 209200 - protein, 10 aa, Artificial Sequence
  Description of Artificial Sequence: Synthetic Linker
TLPSEKQVDL

SEQ ID NO: 209201 - protein, 11 aa, Artificial Sequence
  Description of Artificial Sequence: Synthetic Linker
WLPKWDQTYDV

SEQ ID NO: 209202 - protein, 12 aa, Artificial Sequence
  Description of Artificial Sequence: Synthetic Linker
ALRMGKKEQFPY

SEQ ID NO: 209203 - protein, 13 aa, Artificial Sequence
  Description of Artificial Sequence: Synthetic Linker
NTPKATLADQVNY

SEQ ID NO: 209204 - protein, 27 aa, Artificial Sequence
  Description of Artificial Sequence: Synthetic Linker
YDKSSWNYQLDENGYAKRDETLTHPRC

SEQ ID NO: 209205 - protein, 9 aa, Artificial Sequence
  Description of Artificial Sequence: Synthetic Linker
HLPATIGDY

SEQ ID NO: 209206 - protein, 4 aa, Artificial Sequence
  Description of Artificial Sequence: Synthetic Linker
SNRG

SEQ ID NO: 209207 - protein, 6 aa, Artificial Sequence
  Description of Artificial Sequence: Synthetic Linker
DAVKGK

SEQ ID NO: 209208 - protein, 7 aa, Artificial Sequence
  Description of Artificial Sequence: Synthetic Linker
LLPDGRV

SEQ ID NO: 209209 - protein, 7 aa, Artificial Sequence
  Description of Artificial Sequence: Synthetic Linker
MDGNGQI

SEQ ID NO: 209210 - protein, 7 aa, Artificial Sequence
  Description of Artificial Sequence: Synthetic Linker
QAGPSTA

SEQ ID NO: 209211 - protein, 7 aa, Artificial Sequence
  Description of Artificial Sequence: Synthetic Linker
SDNHAWL

SEQ ID NO: 209212 - protein, 7 aa, Artificial Sequence
  Description of Artificial Sequence: Synthetic Linker
VLPDGST

SEQ ID NO: 209213 - protein, 7 aa, Artificial Sequence
  Description of Artificial Sequence: Synthetic Linker
YNSNGNL

SEQ ID NO: 209214 - protein, 7 aa, Artificial Sequence
  Description of Artificial Sequence: Synthetic Linker
YTSGSGD

SEQ ID NO: 209215 - protein, 8 aa, Artificial Sequence
  Description of Artificial Sequence: Synthetic Linker
DLPIVPAA

SEQ ID NO: 209216 - protein, 8 aa, Artificial Sequence
  Description of Artificial Sequence: Synthetic Linker
IEPTSGRV

SEQ ID NO: 209217 - protein, 8 aa, Artificial Sequence
  Description of Artificial Sequence: Synthetic Linker
WDPSTGIV

SEQ ID NO: 209218 - protein, 9 aa, Artificial Sequence
  Description of Artificial Sequence: Synthetic Linker
EANGQPWTS

SEQ ID NO: 209219 - protein, 9 aa, Artificial Sequence
  Description of Artificial Sequence: Synthetic Linker
MLTADKQGL

SEQ ID NO: 209220 - protein, 9 aa, Artificial Sequence
  Description of Artificial Sequence: Synthetic Linker
VAPDAMCGN

SEQ ID NO: 209221 - protein, 10 aa, Artificial Sequence
  Description of Artificial Sequence: Synthetic Linker
TLGEPGTSPN

SEQ ID NO: 209222 - protein, 12 aa, Artificial Sequence
  Description of Artificial Sequence: Synthetic Linker
VTVTKHDMFCPG

SEQ ID NO: 209223 - protein, 13 aa, Artificial Sequence
  Description of Artificial Sequence: Synthetic Linker
KQNPNSIVRVYHS

SEQ ID NO: 209224 - protein, 14 aa, Artificial Sequence
  Description of Artificial Sequence: Synthetic Linker
FASNGLYFARTFHT

SEQ ID NO: 209225 - protein, 14 aa, Artificial Sequence
  Description of Artificial Sequence: Synthetic Linker
GGGLCGDCTTNHFD

SEQ ID NO: 209226 - protein, 14 aa, Artificial Sequence
  Description of Artificial Sequence: Synthetic Linker
QASSYTAPQPGLGR

SEQ ID NO: 209227 - protein, 16 aa, Artificial Sequence
  Description of Artificial Sequence: Synthetic Linker
FGGSPDYQDSDATTNA

SEQ ID NO: 209228 - protein, 17 aa, Artificial Sequence
  Description of Artificial Sequence: Synthetic Linker
WSSYRNDAFGGSPGGIT

SEQ ID NO: 209229 - protein, 20 aa, Artificial Sequence
  Description of Artificial Sequence: Synthetic Linker
TGGQRRGIPFEDSTPVFTPE

SEQ ID NO: 209230 - protein, 10 aa, Artificial Sequence
  Description of Artificial Sequence: Synthetic Linker
LIPQHTGTFR

SEQ ID NO: 209231 - protein, 11 aa, Artificial Sequence
  Description of Artificial Sequence: Synthetic Linker
EPRSQPHTKPS

SEQ ID NO: 209232 - protein, 4 aa, Artificial Sequence
  Description of Artificial Sequence: Synthetic Linker
KPAP

SEQ ID NO: 209233 - protein, 6 aa, Artificial Sequence
  Description of Artificial Sequence: Synthetic Linker
IEGANG

SEQ ID NO: 209234 - protein, 8 aa, Artificial Sequence
  Description of Artificial Sequence: Synthetic Linker
PIKNMPID

SEQ ID NO: 209235 - protein, 12 aa, Artificial Sequence
  Description of Artificial Sequence: Synthetic Linker
DQPTAHPTVRDE

SEQ ID NO: 209236 - protein, 8 aa, Artificial Sequence
  Description of Artificial Sequence: Synthetic Linker
LVRTLVPT

SEQ ID NO: 209237 - protein, 9 aa, Artificial Sequence
  Description of Artificial Sequence: Synthetic Linker
AGAPVETPQ

SEQ ID NO: 209238 - protein, 11 aa, Artificial Sequence
  Description of Artificial Sequence: Synthetic Linker
SLDAPATSLTG

SEQ ID NO: 209239 - protein, 12 aa, Artificial Sequence
  Description of Artificial Sequence: Synthetic Linker
YAAGTPLSSPEL

SEQ ID NO: 209240 - protein, 4 aa, Artificial Sequence
  Description of Artificial Sequence: Synthetic Linker
KVEH

SEQ ID NO: 209241 - protein, 4 aa, Artificial Sequence
  Description of Artificial Sequence: Synthetic Linker
SHGQ

SEQ ID NO: 209242 - protein, 4 aa, Artificial Sequence
  Description of Artificial Sequence: Synthetic Linker
VDLS

SEQ ID NO: 209243 - protein, 5 aa, Artificial Sequence
  Description of Artificial Sequence: Synthetic Linker
KGLDA

SEQ ID NO: 209244 - protein, 5 aa, Artificial Sequence
  Description of Artificial Sequence: Synthetic Linker
LGPNA

SEQ ID NO: 209245 - protein, 5 aa, Artificial Sequence
  Description of Artificial Sequence: Synthetic Linker
LTGRI

SEQ ID NO: 209246 - protein, 6 aa, Artificial Sequence
  Description of Artificial Sequence: Synthetic Linker
ITRRSV

SEQ ID NO: 209247 - protein, 6 aa, Artificial Sequence
  Description of Artificial Sequence: Synthetic Linker
VKRQDI

SEQ ID NO: 209248 - protein, 7 aa, Artificial Sequence
  Description of Artificial Sequence: Synthetic Linker
FDKTGAE

SEQ ID NO: 209249 - protein, 17 aa, Artificial Sequence
  Description of Artificial Sequence: Synthetic Linker
ESNLQYDAGDKGIYRHY

SEQ ID NO: 209250 - protein, 5 aa, Artificial Sequence
  Description of Artificial Sequence: Synthetic Linker
DIGTI

SEQ ID NO: 209251 - protein, 27 aa, Artificial Sequence
  Description of Artificial Sequence: Synthetic Linker
TKKPVPDFSFYDRSAPIYTQPRYLPPS

SEQ ID NO: 209252 - protein, 4 aa, Artificial Sequence
  Description of Artificial Sequence: Synthetic Linker
KTPL

SEQ ID NO: 209253 - protein, 7 aa, Artificial Sequence
  Description of Artificial Sequence: Synthetic Linker
NCYGCET

SEQ ID NO: 209254 - protein, 16 aa, Artificial Sequence
  Description of Artificial Sequence: Synthetic Linker
YGIDVKIPEGLEPPNE

SEQ ID NO: 209255 - protein, 6 aa, Artificial Sequence
  Description of Artificial Sequence: Synthetic Linker
VGGFYN

SEQ ID NO: 209256 - protein, 7 aa, Artificial Sequence
  Description of Artificial Sequence: Synthetic Linker
VLTGKAR

SEQ ID NO: 209257 - protein, 14 aa, Artificial Sequence
  Description of Artificial Sequence: Synthetic Linker
FDVAESVIPSSGTF

SEQ ID NO: 209258 - protein, 5 aa, Artificial Sequence
  Description of Artificial Sequence: Synthetic Linker
TLKPW

SEQ ID NO: 209259 - protein, 9 aa, Artificial Sequence
  Description of Artificial Sequence: Synthetic Linker
VQNTTHLDE

SEQ ID NO: 209260 - protein, 11 aa, Artificial Sequence
  Description of Artificial Sequence: Synthetic Linker
LKGEPSDMDKA

SEQ ID NO: 209261 - protein, 14 aa, Artificial Sequence
  Description of Artificial Sequence: Synthetic Linker
HFPAMVSRISGIGL

SEQ ID NO: 209262 - protein, 15 aa, Artificial Sequence
  Description of Artificial Sequence: Synthetic Linker
QVSRGAEHLDDLDLN

SEQ ID NO: 209263 - protein, 26 aa, Artificial Sequence
  Description of Artificial Sequence: Synthetic Linker
LAQVDPGENARYCTLQGRNEVPDTLD

SEQ ID NO: 209264 - protein, 27 aa, Artificial Sequence
  Description of Artificial Sequence: Synthetic Linker
YNEEVVALPVGGFYRFRKSGDRHGWEG

SEQ ID NO: 209265 - protein, 13 aa, Artificial Sequence
  Description of Artificial Sequence: Synthetic Linker
HDPFTLEPYSRDP

SEQ ID NO: 209266 - protein, 13 aa, Artificial Sequence
  Description of Artificial Sequence: Synthetic Linker
YTPAGEPIPTNKR

SEQ ID NO: 209267 - protein, 4 aa, Artificial Sequence
  Description of Artificial Sequence: Synthetic Linker
NIPP

SEQ ID NO: 209268 - protein, 4 aa, Artificial Sequence
  Description of Artificial Sequence: Synthetic Linker
RGWA

SEQ ID NO: 209269 - protein, 5 aa, Artificial Sequence
  Description of Artificial Sequence: Synthetic Linker
AFETP

SEQ ID NO: 209270 - protein, 5 aa, Artificial Sequence
  Description of Artificial Sequence: Synthetic Linker
DELRG

SEQ ID NO: 209271 - protein, 6 aa, Artificial Sequence
  Description of Artificial Sequence: Synthetic Linker
EIPDVV

SEQ ID NO: 209272 - protein, 7 aa, Artificial Sequence
  Description of Artificial Sequence: Synthetic Linker
KGGYDGR

SEQ ID NO: 209273 - protein, 7 aa, Artificial Sequence
  Description of Artificial Sequence: Synthetic Linker
RRGEPHV

SEQ ID NO: 209274 - protein, 8 aa, Artificial Sequence
  Description of Artificial Sequence: Synthetic Linker
LKVPRPGT

SEQ ID NO: 209275 - protein, 14 aa, Artificial Sequence
  Description of Artificial Sequence: Synthetic Linker
NLDGKPLLTGKRNP

SEQ ID NO: 209276 - protein, 6 aa, Artificial Sequence
  Description of Artificial Sequence: Synthetic Linker
DHSDVA

SEQ ID NO: 209277 - protein, 8 aa, Artificial Sequence
  Description of Artificial Sequence: Synthetic Linker
FKPAYGSI

SEQ ID NO: 209278 - protein, 19 aa, Artificial Sequence
  Description of Artificial Sequence: Synthetic Linker
AFPGTPHLLPPANSGDADA

SEQ ID NO: 209279 - protein, 12 aa, Artificial Sequence
  Description of Artificial Sequence: Synthetic Linker
YGKDDKLYPKDP

SEQ ID NO: 209280 - protein, 9 aa, Artificial Sequence
  Description of Artificial Sequence: Synthetic Linker
KYNLYGKDI

SEQ ID NO: 209281 - protein, 6 aa, Artificial Sequence
  Description of Artificial Sequence: Synthetic Linker
LREGNL

SEQ ID NO: 209282 - protein, 6 aa, Artificial Sequence
  Description of Artificial Sequence: Synthetic Linker
DCNEKL

SEQ ID NO: 209283 - protein, 6 aa, Artificial Sequence
  Description of Artificial Sequence: Synthetic Linker
LYPSDP

SEQ ID NO: 209284 - protein, 6 aa, Artificial Sequence
  Description of Artificial Sequence: Synthetic Linker
YGAHDA

SEQ ID NO: 209285 - protein, 9 aa, Artificial Sequence
  Description of Artificial Sequence: Synthetic Linker
QFKMMGETD

SEQ ID NO: 209286 - protein, 6 aa, Artificial Sequence
  Description of Artificial Sequence: Synthetic Linker
FETEYF

SEQ ID NO: 209287 - protein, 11 aa, Artificial Sequence
  Description of Artificial Sequence: Synthetic Linker
TSPHDHQTHAY

SEQ ID NO: 209288 - protein, 9 aa, Artificial Sequence
  Description of Artificial Sequence: Synthetic Linker
KADPKGITE

SEQ ID NO: 209289 - protein, 34 aa, Artificial Sequence
  Description of Artificial Sequence: Synthetic Linker
LTAKEPTEVESVECPHIAVGVWEANEKLPETPDR

SEQ ID NO: 209290 - protein, 4 aa, Artificial Sequence
  Description of Artificial Sequence: Synthetic Linker
VVPN

SEQ ID NO: 209291 - protein, 5 aa, Artificial Sequence
  Description of Artificial Sequence: Synthetic Linker
LSPPV

SEQ ID NO: 209292 - protein, 7 aa, Artificial Sequence
  Description of Artificial Sequence: Synthetic Linker
DVKNGEC

SEQ ID NO: 209293 - protein, 7 aa, Artificial Sequence
  Description of Artificial Sequence: Synthetic Linker
KDDIVDR

SEQ ID NO: 209294 - protein, 7 aa, Artificial Sequence
  Description of Artificial Sequence: Synthetic Linker
SDKKCSV

SEQ ID NO: 209295 - protein, 7 aa, Artificial Sequence
  Description of Artificial Sequence: Synthetic Linker
TKVPLVA

SEQ ID NO: 209296 - protein, 9 aa, Artificial Sequence
  Description of Artificial Sequence: Synthetic Linker
LAQLDNYGQ

SEQ ID NO: 209297 - protein, 12 aa, Artificial Sequence
  Description of Artificial Sequence: Synthetic Linker
NYNVKSPITGND

SEQ ID NO: 209298 - protein, 85 aa, Artificial Sequence
  Description of Artificial Sequence: Synthetic Linker
KPLKEPKTVNVVQFEPSKGAIGKAYKKDAKLVMEYLAICDECYITEMEMLLNEKGEFTIETEGKTFQLTKDMINVKRFQKTLYVE

SEQ ID NO: 209299 - protein, 4 aa, Artificial Sequence
  Description of Artificial Sequence: Synthetic Linker
SNGG

SEQ ID NO: 209300 - protein, 13 aa, Artificial Sequence
  Description of Artificial Sequence: Synthetic Linker
FSVDEIVQPDPPI

SEQ ID NO: 209301 - protein, 10 aa, Artificial Sequence
  Description of Artificial Sequence: Synthetic Linker
LTPRRSRKLK

SEQ ID NO: 209302 - protein, 6 aa, Artificial Sequence
  Description of Artificial Sequence: Synthetic Linker
DEPRSV

SEQ ID NO: 209303 - protein, 29 aa, Artificial Sequence
  Description of Artificial Sequence: Synthetic Linker
LPTANGDGGALALDSLTVLGAGGNNANDW

SEQ ID NO: 209304 - protein, 6 aa, Artificial Sequence
  Description of Artificial Sequence: Synthetic Linker
RNNLTR

SEQ ID NO: 209305 - protein, 8 aa, Artificial Sequence
  Description of Artificial Sequence: Synthetic Linker
RAMTDVHQ

SEQ ID NO: 209306 - protein, 24 aa, Artificial Sequence
  Description of Artificial Sequence: Synthetic Linker
TTENPELQLEPLSAPEVTEPTATD

SEQ ID NO: 209307 - protein, 6 aa, Artificial Sequence
  Description of Artificial Sequence: Synthetic Linker
VPRDCG

SEQ ID NO: 209308 - protein, 7 aa, Artificial Sequence
  Description of Artificial Sequence: Synthetic Linker
VRSRGPE

SEQ ID NO: 209309 - protein, 40 aa, Artificial Sequence
  Description of Artificial Sequence: Synthetic Linker
QEPEFQRMSALRLAACKRKEQEHGKDRGNTPKKPRLVFTD

SEQ ID NO: 209310 - protein, 14 aa, Artificial Sequence
  Description of Artificial Sequence: Synthetic Linker
AEGFGLPEEKGPDL

SEQ ID NO: 209311 - protein, 4 aa, Artificial Sequence
  Description of Artificial Sequence: Synthetic Linker
KGGK

SEQ ID NO: 209312 - protein, 6 aa, Artificial Sequence
  Description of Artificial Sequence: Synthetic Linker
KNQKPI

SEQ ID NO: 209313 - protein, 7 aa, Artificial Sequence
  Description of Artificial Sequence: Synthetic Linker
RGTLNVS

SEQ ID NO: 209314 - protein, 9 aa, Artificial Sequence
  Description of Artificial Sequence: Synthetic Linker
TVGAGLPII

SEQ ID NO: 209315 - protein, 4 aa, Artificial Sequence
  Description of Artificial Sequence: Synthetic Linker
LDGE

SEQ ID NO: 209316 - protein, 4 aa, Artificial Sequence
  Description of Artificial Sequence: Synthetic Linker
LGNW

SEQ ID NO: 209317 - protein, 7 aa, Artificial Sequence
  Description of Artificial Sequence: Synthetic Linker
HLFPDCA

SEQ ID NO: 209318 - protein, 18 aa, Artificial Sequence
  Description of Artificial Sequence: Synthetic Linker
IPKAELLTSESRGVLPDT

SEQ ID NO: 209319 - protein, 5 aa, Artificial Sequence
  Description of Artificial Sequence: Synthetic Linker
ETVAP

SEQ ID NO: 209320 - protein, 6 aa, Artificial Sequence
  Description of Artificial Sequence: Synthetic Linker
QGLTSF

SEQ ID NO: 209321 - protein, 7 aa, Artificial Sequence
  Description of Artificial Sequence: Synthetic Linker
VSKPKME

SEQ ID NO: 209322 - protein, 5 aa, Artificial Sequence
  Description of Artificial Sequence: Synthetic Linker
TVAAP

SEQ ID NO: 209323 - protein, 26 aa, Artificial Sequence
  Description of Artificial Sequence: Synthetic Linker
GGNPPGGNRGTTTTRRPATTTGSSPG

SEQ ID NO: 209324 - protein, 7 aa, Artificial Sequence
  Description of Artificial Sequence: Synthetic Linker
CKPCICT

SEQ ID NO: 209325 - protein, 6 aa, Artificial Sequence
  Description of Artificial Sequence: Synthetic Linker
VPSEVS

SEQ ID NO: 209326 - protein, 10 aa, Artificial Sequence
  Description of Artificial Sequence: Synthetic Linker
EPKSCDKTHT

SEQ ID NO: 209327 - protein, 7 aa, Artificial Sequence
  Description of Artificial Sequence: Synthetic Linker
CPPCKCP

SEQ ID NO: 209328 - protein, 9 aa, Artificial Sequence
  Description of Artificial Sequence: Synthetic Linker
EPRGPTIKP

SEQ ID NO: 209329 - protein, 5 aa, Artificial Sequence
  Description of Artificial Sequence: Synthetic Linker
ATENE

SEQ ID NO: 209330 - protein, 6 aa, Artificial Sequence
  Description of Artificial Sequence: Synthetic Linker
AKSVGI

SEQ ID NO: 209331 - protein, 7 aa, Artificial Sequence
  Description of Artificial Sequence: Synthetic Linker
ATWTGDS

SEQ ID NO: 209332 - protein, 10 aa, Artificial Sequence
  Description of Artificial Sequence: Synthetic Linker
ATITNANWDD

SEQ ID NO: 209333 - protein, 11 aa, Artificial Sequence
  Description of Artificial Sequence: Synthetic Linker
NGKDFSEPLPE

SEQ ID NO: 209334 - protein, 6 aa, Artificial Sequence
  Description of Artificial Sequence: Synthetic Linker
KQPLRR

SEQ ID NO: 209335 - protein, 8 aa, Artificial Sequence
  Description of Artificial Sequence: Synthetic Linker
LSPYTESS

SEQ ID NO: 209336 - protein, 4 aa, Artificial Sequence
  Description of Artificial Sequence: Synthetic Linker
VDSE

SEQ ID NO: 209337 - protein, 5 aa, Artificial Sequence
  Description of Artificial Sequence: Synthetic Linker
FVTGP

SEQ ID NO: 209338 - protein, 7 aa, Artificial Sequence
  Description of Artificial Sequence: Synthetic Linker
IKGDAYY

SEQ ID NO: 209339 - protein, 8 aa, Artificial Sequence
  Description of Artificial Sequence: Synthetic Linker
TKSGVVHF

SEQ ID NO: 209340 - protein, 9 aa, Artificial Sequence
  Description of Artificial Sequence: Synthetic Linker
VVLGEEVSF

SEQ ID NO: 209341 - protein, 12 aa, Artificial Sequence
  Description of Artificial Sequence: Synthetic Linker
IVPNDAAKPYNM

SEQ ID NO: 209342 - protein, 26 aa, Artificial Sequence
  Description of Artificial Sequence: Synthetic Linker
YLPSNNMEEPPYIDTGDPADRDATGV

SEQ ID NO: 209343 - protein, 4 aa, Artificial Sequence
  Description of Artificial Sequence: Synthetic Linker
GALP

SEQ ID NO: 209344 - protein, 8 aa, Artificial Sequence
  Description of Artificial Sequence: Synthetic Linker
FGVDWLKG

SEQ ID NO: 209345 - protein, 4 aa, Artificial Sequence
  Description of Artificial Sequence: Synthetic Linker
ILPQ

SEQ ID NO: 209346 - protein, 7 aa, Artificial Sequence
  Description of Artificial Sequence: Synthetic Linker
EAPLDNS

SEQ ID NO: 209347 - protein, 14 aa, Artificial Sequence
  Description of Artificial Sequence: Synthetic Linker
AAERVPLANPFAGE

SEQ ID NO: 209348 - protein, 4 aa, Artificial Sequence
  Description of Artificial Sequence: Synthetic Linker
EGVL

SEQ ID NO: 209349 - protein, 6 aa, Artificial Sequence
  Description of Artificial Sequence: Synthetic Linker
LVKIEP

SEQ ID NO: 209350 - protein, 6 aa, Artificial Sequence
  Description of Artificial Sequence: Synthetic Linker
RSLIGD

SEQ ID NO: 209351 - protein, 7 aa, Artificial Sequence
  Description of Artificial Sequence: Synthetic Linker
DASAVHP

SEQ ID NO: 209352 - protein, 7 aa, Artificial Sequence
  Description of Artificial Sequence: Synthetic Linker
EFPELDV

SEQ ID NO: 209353 - protein, 7 aa, Artificial Sequence
  Description of Artificial Sequence: Synthetic Linker
FSDYFEH

SEQ ID NO: 209354 - protein, 7 aa, Artificial Sequence
  Description of Artificial Sequence: Synthetic Linker
KVSRLGE

SEQ ID NO: 209355 - protein, 7 aa, Artificial Sequence
  Description of Artificial Sequence: Synthetic Linker
NGAFRTR

SEQ ID NO: 209356 - protein, 7 aa, Artificial Sequence
  Description of Artificial Sequence: Synthetic Linker
PLKSAPS

SEQ ID NO: 209357 - protein, 8 aa, Artificial Sequence
  Description of Artificial Sequence: Synthetic Linker
ARISGLNS

SEQ ID NO: 209358 - protein, 10 aa, Artificial Sequence
  Description of Artificial Sequence: Synthetic Linker
QRIAADTERD

SEQ ID NO: 209359 - protein, 11 aa, Artificial Sequence
  Description of Artificial Sequence: Synthetic Linker
ERFGLSNQGRA

SEQ ID NO: 209360 - protein, 11 aa, Artificial Sequence
  Description of Artificial Sequence: Synthetic Linker
LLAAPAGPRAT

SEQ ID NO: 209361 - protein, 12 aa, Artificial Sequence
  Description of Artificial Sequence: Synthetic Linker
KVGEEAPGTLHP

SEQ ID NO: 209362 - protein, 12 aa, Artificial Sequence
  Description of Artificial Sequence: Synthetic Linker
NAVGVDVNTASA

SEQ ID NO: 209363 - protein, 13 aa, Artificial Sequence
  Description of Artificial Sequence: Synthetic Linker
AAGFLRVMNGDNP

SEQ ID NO: 209364 - protein, 13 aa, Artificial Sequence
  Description of Artificial Sequence: Synthetic Linker
GVESLKDLKPGMV

SEQ ID NO: 209365 - protein, 13 aa, Artificial Sequence
  Description of Artificial Sequence: Synthetic Linker
SIGVGQYQHDVSQ

SEQ ID NO: 209366 - protein, 17 aa, Artificial Sequence
  Description of Artificial Sequence: Synthetic Linker
LDKPGRDPRPEFKTAEF

SEQ ID NO: 209367 - protein, 23 aa, Artificial Sequence
  Description of Artificial Sequence: Synthetic Linker
LKRLDPKKFTDETFGLPTVTDIL

SEQ ID NO: 209368 - protein, 4 aa, Artificial Sequence
  Description of Artificial Sequence: Synthetic Linker
LEGE

SEQ ID NO: 209369 - protein, 5 aa, Artificial Sequence
  Description of Artificial Sequence: Synthetic Linker
RLGFK

SEQ ID NO: 209370 - protein, 9 aa, Artificial Sequence
  Description of Artificial Sequence: Synthetic Linker
RGRPFEPPV

SEQ ID NO: 209371 - protein, 15 aa, Artificial Sequence
  Description of Artificial Sequence: Synthetic Linker
RGEVEETLKEDLPNV

SEQ ID NO: 209372 - protein, 4 aa, Artificial Sequence
  Description of Artificial Sequence: Synthetic Linker
LEYE

SEQ ID NO: 209373 - protein, 9 aa, Artificial Sequence
  Description of Artificial Sequence: Synthetic Linker
SYGLPPLNA

SEQ ID NO: 209374 - protein, 5 aa, Artificial Sequence
  Description of Artificial Sequence: Synthetic Linker
ILHDE

SEQ ID NO: 209375 - protein, 13 aa, Artificial Sequence
  Description of Artificial Sequence: Synthetic Linker
KGWGGLPIGTEGR

SEQ ID NO: 209376 - protein, 4 aa, Artificial Sequence
  Description of Artificial Sequence: Synthetic Linker
PQSP

SEQ ID NO: 209377 - protein, 6 aa, Artificial Sequence
  Description of Artificial Sequence: Synthetic Linker
DGFEAL

SEQ ID NO: 209378 - protein, 6 aa, Artificial Sequence
  Description of Artificial Sequence: Synthetic Linker
EQNPWK

SEQ ID NO: 209379 - protein, 6 aa, Artificial Sequence
  Description of Artificial Sequence: Synthetic Linker
SEHWQR

SEQ ID NO: 209380 - protein, 9 aa, Artificial Sequence
  Description of Artificial Sequence: Synthetic Linker
LDPQACPTV

SEQ ID NO: 209381 - protein, 5 aa, Artificial Sequence
  Description of Artificial Sequence: Synthetic Linker
KTPLT

SEQ ID NO: 209382 - protein, 6 aa, Artificial Sequence
  Description of Artificial Sequence: Synthetic Linker
LRQLTT

SEQ ID NO: 209383 - protein, 4 aa, Artificial Sequence
  Description of Artificial Sequence: Synthetic Linker
QNDI

SEQ ID NO: 209384 - protein, 7 aa, Artificial Sequence
  Description of Artificial Sequence: Synthetic Linker
INARAPV

SEQ ID NO: 209385 - protein, 9 aa, Artificial Sequence
  Description of Artificial Sequence: Synthetic Linker
TVTHGDIDL

SEQ ID NO: 209386 - protein, 10 aa, Artificial Sequence
  Description of Artificial Sequence: Synthetic Linker
TKTDVAGEAE

SEQ ID NO: 209387 - protein, 24 aa, Artificial Sequence
  Description of Artificial Sequence: Synthetic Linker
LFNTNGFMLEENVVSTKPRFHFIA

SEQ ID NO: 209388 - protein, 7 aa, Artificial Sequence
  Description of Artificial Sequence: Synthetic Linker
ASLDQPF

SEQ ID NO: 209389 - protein, 9 aa, Artificial Sequence
  Description of Artificial Sequence: Synthetic Linker
VKPGRQYQE

SEQ ID NO: 209390 - protein, 4 aa, Artificial Sequence
  Description of Artificial Sequence: Synthetic Linker
DGFE

SEQ ID NO: 209391 - protein, 5 aa, Artificial Sequence
  Description of Artificial Sequence: Synthetic Linker
LRRFN

SEQ ID NO: 209392 - protein, 6 aa, Artificial Sequence
  Description of Artificial Sequence: Synthetic Linker
KRTGET

SEQ ID NO: 209393 - protein, 16 aa, Artificial Sequence
  Description of Artificial Sequence: Synthetic Linker
VEGEQSIPMVSRLGMK

SEQ ID NO: 209394 - protein, 22 aa, Artificial Sequence
  Description of Artificial Sequence: Synthetic Linker
AEGHITTNHVAATRAAKSKVRR

SEQ ID NO: 209395 - protein, 8 aa, Artificial Sequence
  Description of Artificial Sequence: Synthetic Linker
VDKSDEPL

SEQ ID NO: 209396 - protein, 7 aa, Artificial Sequence
  Description of Artificial Sequence: Synthetic Linker
IVSPANE

SEQ ID NO: 209397 - protein, 11 aa, Artificial Sequence
  Description of Artificial Sequence: Synthetic Linker
VENEPNLCYNA

SEQ ID NO: 209398 - protein, 13 aa, Artificial Sequence
  Description of Artificial Sequence: Synthetic Linker
FITLEENKPTRPV

SEQ ID NO: 209399 - protein, 4 aa, Artificial Sequence
  Description of Artificial Sequence: Synthetic Linker
EDGI

SEQ ID NO: 209400 - protein, 4 aa, Artificial Sequence
  Description of Artificial Sequence: Synthetic Linker
HKLK

SEQ ID NO: 209401 - protein, 4 aa, Artificial Sequence
  Description of Artificial Sequence: Synthetic Linker
KGGE

SEQ ID NO: 209402 - protein, 4 aa, Artificial Sequence
  Description of Artificial Sequence: Synthetic Linker
SHSL

SEQ ID NO: 209403 - protein, 6 aa, Artificial Sequence
  Description of Artificial Sequence: Synthetic Linker
WSTDIL

SEQ ID NO: 209404 - protein, 9 aa, Artificial Sequence
  Description of Artificial Sequence: Synthetic Linker
DIIKPDPPK

SEQ ID NO: 209405 - protein, 13 aa, Artificial Sequence
  Description of Artificial Sequence: Synthetic Linker
KDQKEPKNKTFLR

SEQ ID NO: 209406 - protein, 7 aa, Artificial Sequence
  Description of Artificial Sequence: Synthetic Linker
WDNQCQC

SEQ ID NO: 209407 - protein, 42 aa, Artificial Sequence
  Description of Artificial Sequence: Synthetic Linker
SSATRSTTKQVTPQPEEQKERKTTEMQSPMQPVDQASLPGHC

SEQ ID NO: 209408 - protein, 5 aa, Artificial Sequence
  Description of Artificial Sequence: Synthetic Linker
LNKPI

SEQ ID NO: 209409 - protein, 5 aa, Artificial Sequence
  Description of Artificial Sequence: Synthetic Linker
NHQSN

SEQ ID NO: 209410 - protein, 5 aa, Artificial Sequence
  Description of Artificial Sequence: Synthetic Linker
NSIDQ

SEQ ID NO: 209411 - protein, 7 aa, Artificial Sequence
  Description of Artificial Sequence: Synthetic Linker
YLPNVTK

SEQ ID NO: 209412 - protein, 9 aa, Artificial Sequence
  Description of Artificial Sequence: Synthetic Linker
LANLKNLGW

SEQ ID NO: 209413 - protein, 9 aa, Artificial Sequence
  Description of Artificial Sequence: Synthetic Linker
LKDLKKLKS

SEQ ID NO: 209414 - protein, 10 aa, Artificial Sequence
  Description of Artificial Sequence: Synthetic Linker
FLDENKVKDL

SEQ ID NO: 209415 - protein, 10 aa, Artificial Sequence
  Description of Artificial Sequence: Synthetic Linker
NLKKKSVTDA

SEQ ID NO: 209416 - protein, 11 aa, Artificial Sequence
  Description of Artificial Sequence: Synthetic Linker
FLNGNKLTDIK

SEQ ID NO: 209417 - protein, 11 aa, Artificial Sequence
  Description of Artificial Sequence: Synthetic Linker
PNTVKNTDGSL

SEQ ID NO: 209418 - protein, 11 aa, Artificial Sequence
  Description of Artificial Sequence: Synthetic Linker
SLEHNGISDIN

SEQ ID NO: 209419 - protein, 13 aa, Artificial Sequence
  Description of Artificial Sequence: Synthetic Linker
IANNSDIKSVQGI

SEQ ID NO: 209420 - protein, 5 aa, Artificial Sequence
  Description of Artificial Sequence: Synthetic Linker
FTTLT

SEQ ID NO: 209421 - protein, 5 aa, Artificial Sequence
  Description of Artificial Sequence: Synthetic Linker
KAPEV

SEQ ID NO: 209422 - protein, 9 aa, Artificial Sequence
  Description of Artificial Sequence: Synthetic Linker
VSDVAVDVV

SEQ ID NO: 209423 - protein, 6 aa, Artificial Sequence
  Description of Artificial Sequence: Synthetic Linker
INTSYF

SEQ ID NO: 209424 - protein, 22 aa, Artificial Sequence
  Description of Artificial Sequence: Synthetic Linker
SGIISLEDLPDYTRSDEPLNSI

SEQ ID NO: 209425 - protein, 4 aa, Artificial Sequence
  Description of Artificial Sequence: Synthetic Linker
VNGQ

SEQ ID NO: 209426 - protein, 5 aa, Artificial Sequence
  Description of Artificial Sequence: Synthetic Linker
FKNAT

SEQ ID NO: 209427 - protein, 5 aa, Artificial Sequence
  Description of Artificial Sequence: Synthetic Linker
FYPNR

SEQ ID NO: 209428 - protein, 5 aa, Artificial Sequence
  Description of Artificial Sequence: Synthetic Linker
MDNDV

SEQ ID NO: 209429 - protein, 6 aa, Artificial Sequence
  Description of Artificial Sequence: Synthetic Linker
FPVPTL

SEQ ID NO: 209430 - protein, 6 aa, Artificial Sequence
  Description of Artificial Sequence: Synthetic Linker
VNDQGQ

SEQ ID NO: 209431 - protein, 7 aa, Artificial Sequence
  Description of Artificial Sequence: Synthetic Linker
SSFTPNV

SEQ ID NO: 209432 - protein, 7 aa, Artificial Sequence
  Description of Artificial Sequence: Synthetic Linker
VKGTIAA

SEQ ID NO: 209433 - protein, 8 aa, Artificial Sequence
  Description of Artificial Sequence: Synthetic Linker
SKKFPSYS

SEQ ID NO: 209434 - protein, 9 aa, Artificial Sequence
  Description of Artificial Sequence: Synthetic Linker
ITYQTYSEV

SEQ ID NO: 209435 - protein, 10 aa, Artificial Sequence
  Description of Artificial Sequence: Synthetic Linker
FATDKGFPKT

SEQ ID NO: 209436 - protein, 12 aa, Artificial Sequence
  Description of Artificial Sequence: Synthetic Linker
TADPIPDAGRSS

SEQ ID NO: 209437 - protein, 4 aa, Artificial Sequence
  Description of Artificial Sequence: Synthetic Linker
EKCF

SEQ ID NO: 209438 - protein, 4 aa, Artificial Sequence
  Description of Artificial Sequence: Synthetic Linker
KNGK

SEQ ID NO: 209439 - protein, 5 aa, Artificial Sequence
  Description of Artificial Sequence: Synthetic Linker
EKSHM

SEQ ID NO: 209440 - protein, 5 aa, Artificial Sequence
  Description of Artificial Sequence: Synthetic Linker
NTNSD

SEQ ID NO: 209441 - protein, 6 aa, Artificial Sequence
  Description of Artificial Sequence: Synthetic Linker
NAPEKH

SEQ ID NO: 209442 - protein, 7 aa, Artificial Sequence
  Description of Artificial Sequence: Synthetic Linker
ACPVAAL

SEQ ID NO: 209443 - protein, 7 aa, Artificial Sequence
  Description of Artificial Sequence: Synthetic Linker
DERSKSL

SEQ ID NO: 209444 - protein, 7 aa, Artificial Sequence
  Description of Artificial Sequence: Synthetic Linker
KCLLCGR

SEQ ID NO: 209445 - protein, 7 aa, Artificial Sequence
  Description of Artificial Sequence: Synthetic Linker
TETYAMK

SEQ ID NO: 209446 - protein, 9 aa, Artificial Sequence
  Description of Artificial Sequence: Synthetic Linker
DTNCLLCGQ

SEQ ID NO: 209447 - protein, 10 aa, Artificial Sequence
  Description of Artificial Sequence: Synthetic Linker
NGGGQPHVNP

SEQ ID NO: 209448 - protein, 14 aa, Artificial Sequence
  Description of Artificial Sequence: Synthetic Linker
YKARASKPFLPKDK

SEQ ID NO: 209449 - protein, 18 aa, Artificial Sequence
  Description of Artificial Sequence: Synthetic Linker
LDIHEFKCGPCNRRENCE

SEQ ID NO: 209450 - protein, 6 aa, Artificial Sequence
  Description of Artificial Sequence: Synthetic Linker
VVGGEL

SEQ ID NO: 209451 - protein, 5 aa, Artificial Sequence
  Description of Artificial Sequence: Synthetic Linker
HNGFF

SEQ ID NO: 209452 - protein, 11 aa, Artificial Sequence
  Description of Artificial Sequence: Synthetic Linker
VKGKEGDEEEE

SEQ ID NO: 209453 - protein, 4 aa, Artificial Sequence
  Description of Artificial Sequence: Synthetic Linker
KLIV

SEQ ID NO: 209454 - protein, 6 aa, Artificial Sequence
  Description of Artificial Sequence: Synthetic Linker
TIGNRA

SEQ ID NO: 209455 - protein, 13 aa, Artificial Sequence
  Description of Artificial Sequence: Synthetic Linker
VPPSKPTVNIPSS

SEQ ID NO: 209456 - protein, 5 aa, Artificial Sequence
  Description of Artificial Sequence: Synthetic Linker
FFSIL

SEQ ID NO: 209457 - protein, 6 aa, Artificial Sequence
  Description of Artificial Sequence: Synthetic Linker
TTGEWK

SEQ ID NO: 209458 - protein, 7 aa, Artificial Sequence
  Description of Artificial Sequence: Synthetic Linker
MSTEEAE

SEQ ID NO: 209459 - protein, 8 aa, Artificial Sequence
  Description of Artificial Sequence: Synthetic Linker
ASQVESDW

SEQ ID NO: 209460 - protein, 7 aa, Artificial Sequence
  Description of Artificial Sequence: Synthetic Linker
KLHLSNC

SEQ ID NO: 209461 - protein, 4 aa, Artificial Sequence
  Description of Artificial Sequence: Synthetic Linker
DANF

SEQ ID NO: 209462 - protein, 7 aa, Artificial Sequence
  Description of Artificial Sequence: Synthetic Linker
VGLEKNA

SEQ ID NO: 209463 - protein, 8 aa, Artificial Sequence
  Description of Artificial Sequence: Synthetic Linker
TNSTEETL

SEQ ID NO: 209464 - protein, 9 aa, Artificial Sequence
  Description of Artificial Sequence: Synthetic Linker
KTWENVNAQ

SEQ ID NO: 209465 - protein, 9 aa, Artificial Sequence
  Description of Artificial Sequence: Synthetic Linker
YLPTLYVSQ

SEQ ID NO: 209466 - protein, 11 aa, Artificial Sequence
  Description of Artificial Sequence: Synthetic Linker
SHRYGFGKIDA

SEQ ID NO: 209467 - protein, 12 aa, Artificial Sequence
  Description of Artificial Sequence: Synthetic Linker
GDWRDSAMGKKY

SEQ ID NO: 209468 - protein, 4 aa, Artificial Sequence
  Description of Artificial Sequence: Synthetic Linker
KGTL

SEQ ID NO: 209469 - protein, 7 aa, Artificial Sequence
  Description of Artificial Sequence: Synthetic Linker
KLNKDIV

SEQ ID NO: 209470 - protein, 8 aa, Artificial Sequence
  Description of Artificial Sequence: Synthetic Linker
ETRKRALS

SEQ ID NO: 209471 - protein, 33 aa, Artificial Sequence
  Description of Artificial Sequence: Synthetic Linker
VYPPDYNPEGKVTKRKHDNEGSGSKRPKVEYSE

SEQ ID NO: 209472 - protein, 8 aa, Artificial Sequence
  Description of Artificial Sequence: Synthetic Linker
IERHSIHW

SEQ ID NO: 209473 - protein, 9 aa, Artificial Sequence
  Description of Artificial Sequence: Synthetic Linker
DLTGTPLFV

SEQ ID NO: 209474 - protein, 10 aa, Artificial Sequence
  Description of Artificial Sequence: Synthetic Linker
NGPASLPYDI

SEQ ID NO: 209475 - protein, 14 aa, Artificial Sequence
  Description of Artificial Sequence: Synthetic Linker
VNGSDINVDWGKPI

SEQ ID NO: 209476 - protein, 44 aa, Artificial Sequence
  Description of Artificial Sequence: Synthetic Linker
YAGAPGGLPTDEGTPPVDHQCLDTLDVRPVVPRSVPVNSFVKRP

SEQ ID NO: 209477 - protein, 6 aa, Artificial Sequence
  Description of Artificial Sequence: Synthetic Linker
QFGRKG

SEQ ID NO: 209478 - protein, 9 aa, Artificial Sequence
  Description of Artificial Sequence: Synthetic Linker
IASGAIGGL

SEQ ID NO: 209479 - protein, 4 aa, Artificial Sequence
  Description of Artificial Sequence: Synthetic Linker
SGNP

SEQ ID NO: 209480 - protein, 6 aa, Artificial Sequence
  Description of Artificial Sequence: Synthetic Linker
VTGISP

SEQ ID NO: 209481 - protein, 6 aa, Artificial Sequence
  Description of Artificial Sequence: Synthetic Linker
IKRADA

SEQ ID NO: 209482 - protein, 7 aa, Artificial Sequence
  Description of Artificial Sequence: Synthetic Linker
VQPKLTA

SEQ ID NO: 209483 - protein, 14 aa, Artificial Sequence
  Description of Artificial Sequence: Synthetic Linker
TGVMKNDTNENLKK

SEQ ID NO: 209484 - protein, 24 aa, Artificial Sequence
  Description of Artificial Sequence: Synthetic Linker
FLPRVGVGTSFGLPQTRRISLASP

SEQ ID NO: 209485 - protein, 4 aa, Artificial Sequence
  Description of Artificial Sequence: Synthetic Linker
ASNM

SEQ ID NO: 209486 - protein, 6 aa, Artificial Sequence
  Description of Artificial Sequence: Synthetic Linker
ESKPSV

SEQ ID NO: 209487 - protein, 7 aa, Artificial Sequence
  Description of Artificial Sequence: Synthetic Linker
IKMLGSK

SEQ ID NO: 209488 - protein, 7 aa, Artificial Sequence
  Description of Artificial Sequence: Synthetic Linker
LRREPNL

SEQ ID NO: 209489 - protein, 7 aa, Artificial Sequence
  Description of Artificial Sequence: Synthetic Linker
LSRSSNP

SEQ ID NO: 209490 - protein, 8 aa, Artificial Sequence
  Description of Artificial Sequence: Synthetic Linker
RLGCRYSK

SEQ ID NO: 209491 - protein, 4 aa, Artificial Sequence
  Description of Artificial Sequence: Synthetic Linker
ETPA

SEQ ID NO: 209492 - protein, 8 aa, Artificial Sequence
  Description of Artificial Sequence: Synthetic Linker
FANHTYVP

SEQ ID NO: 209493 - protein, 5 aa, Artificial Sequence
  Description of Artificial Sequence: Synthetic Linker
LFEWL

SEQ ID NO: 209494 - protein, 14 aa, Artificial Sequence
  Description of Artificial Sequence: Synthetic Linker
HELGGKNASGGYGG

SEQ ID NO: 209495 - protein, 5 aa, Artificial Sequence
  Description of Artificial Sequence: Synthetic Linker
RGDVG

SEQ ID NO: 209496 - protein, 4 aa, Artificial Sequence
  Description of Artificial Sequence: Synthetic Linker
DYTR

SEQ ID NO: 209497 - protein, 8 aa, Artificial Sequence
  Description of Artificial Sequence: Synthetic Linker
QTQAVSQQ

SEQ ID NO: 209498 - protein, 8 aa, Artificial Sequence
  Description of Artificial Sequence: Synthetic Linker
YTDHQMLV

SEQ ID NO: 209499 - protein, 4 aa, Artificial Sequence
  Description of Artificial Sequence: Synthetic Linker
LNNR

SEQ ID NO: 209500 - protein, 12 aa, Artificial Sequence
  Description of Artificial Sequence: Synthetic Linker
TCRKTNKLSPYD

SEQ ID NO: 209501 - protein, 5 aa, Artificial Sequence
  Description of Artificial Sequence: Synthetic Linker
VVNNV

SEQ ID NO: 209502 - protein, 7 aa, Artificial Sequence
  Description of Artificial Sequence: Synthetic Linker
VQARASS

SEQ ID NO: 209503 - protein, 8 aa, Artificial Sequence
  Description of Artificial Sequence: Synthetic Linker
TYIPRKEV

SEQ ID NO: 209504 - protein, 10 aa, Artificial Sequence
  Description of Artificial Sequence: Synthetic Linker
IQATIIRQNQ

SEQ ID NO: 209505 - protein, 4 aa, Artificial Sequence
  Description of Artificial Sequence: Synthetic Linker
KGDD

SEQ ID NO: 209506 - protein, 4 aa, Artificial Sequence
  Description of Artificial Sequence: Synthetic Linker
SDVV

SEQ ID NO: 209507 - protein, 6 aa, Artificial Sequence
  Description of Artificial Sequence: Synthetic Linker
VAQSSY

SEQ ID NO: 209508 - protein, 8 aa, Artificial Sequence
  Description of Artificial Sequence: Synthetic Linker
TSRDYDTQ

SEQ ID NO: 209509 - protein, 11 aa, Artificial Sequence
  Description of Artificial Sequence: Synthetic Linker
YAPFLPKTWTS

SEQ ID NO: 209510 - protein, 5 aa, Artificial Sequence
  Description of Artificial Sequence: Synthetic Linker
AGVNL

SEQ ID NO: 209511 - protein, 11 aa, Artificial Sequence
  Description of Artificial Sequence: Synthetic Linker
TLLLKSPTTHP

SEQ ID NO: 209512 - protein, 5 aa, Artificial Sequence
  Description of Artificial Sequence: Synthetic Linker
VESAM

SEQ ID NO: 209513 - protein, 6 aa, Artificial Sequence
  Description of Artificial Sequence: Synthetic Linker
GPLWSN

SEQ ID NO: 209514 - protein, 9 aa, Artificial Sequence
  Description of Artificial Sequence: Synthetic Linker
QVENTGIHE

SEQ ID NO: 209515 - protein, 8 aa, Artificial Sequence
  Description of Artificial Sequence: Synthetic Linker
SCDNLPHN

SEQ ID NO: 209516 - protein, 16 aa, Artificial Sequence
  Description of Artificial Sequence: Synthetic Linker
ICDRNHTWLPVSDDAC

SEQ ID NO: 209517 - protein, 4 aa, Artificial Sequence
  Description of Artificial Sequence: Synthetic Linker
YYPA

SEQ ID NO: 209518 - protein, 5 aa, Artificial Sequence
  Description of Artificial Sequence: Synthetic Linker
SGQPL

SEQ ID NO: 209519 - protein, 5 aa, Artificial Sequence
  Description of Artificial Sequence: Synthetic Linker
VYSGK

SEQ ID NO: 209520 - protein, 7 aa, Artificial Sequence
  Description of Artificial Sequence: Synthetic Linker
VNDQGKE

SEQ ID NO: 209521 - protein, 11 aa, Artificial Sequence
  Description of Artificial Sequence: Synthetic Linker
FGNKYWLMLNE

SEQ ID NO: 209522 - protein, 19 aa, Artificial Sequence
  Description of Artificial Sequence: Synthetic Linker
QSFAPVKGASAVPLVGRAS

SEQ ID NO: 209523 - protein, 4 aa, Artificial Sequence
  Description of Artificial Sequence: Synthetic Linker
PVSE

SEQ ID NO: 209524 - protein, 5 aa, Artificial Sequence
  Description of Artificial Sequence: Synthetic Linker
AGKLV

SEQ ID NO: 209525 - protein, 7 aa, Artificial Sequence
  Description of Artificial Sequence: Synthetic Linker
LEKDGSN

SEQ ID NO: 209526 - protein, 14 aa, Artificial Sequence
  Description of Artificial Sequence: Synthetic Linker
NNDPSWNPGPTWDP

SEQ ID NO: 209527 - protein, 4 aa, Artificial Sequence
  Description of Artificial Sequence: Synthetic Linker
GVPF

SEQ ID NO: 209528 - protein, 4 aa, Artificial Sequence
  Description of Artificial Sequence: Synthetic Linker
ICQS

SEQ ID NO: 209529 - protein, 6 aa, Artificial Sequence
  Description of Artificial Sequence: Synthetic Linker
VNYEDP

SEQ ID NO: 209530 - protein, 8 aa, Artificial Sequence
  Description of Artificial Sequence: Synthetic Linker
RARGENEP

SEQ ID NO: 209531 - protein, 6 aa, Artificial Sequence
  Description of Artificial Sequence: Synthetic Linker
LAGTGP

SEQ ID NO: 209532 - protein, 10 aa, Artificial Sequence
  Description of Artificial Sequence: Synthetic Linker
AAGGSVKGKK

SEQ ID NO: 209533 - protein, 8 aa, Artificial Sequence
  Description of Artificial Sequence: Synthetic Linker
LMTPEYVA

SEQ ID NO: 209534 - protein, 17 aa, Artificial Sequence
  Description of Artificial Sequence: Synthetic Linker
GFESVLEAVTALAFYVP

SEQ ID NO: 209535 - protein, 18 aa, Artificial Sequence
  Description of Artificial Sequence: Synthetic Linker
HKLGAVDVPDLVYSEAGP

SEQ ID NO: 209536 - protein, 35 aa, Artificial Sequence
  Description of Artificial Sequence: Synthetic Linker
QHPPKDSSGQRVAVSPTSQRLQLLEPFDKWDGKDL

SEQ ID NO: 209537 - protein, 41 aa, Artificial Sequence
  Description of Artificial Sequence: Synthetic Linker
TLKFNPETDFLTGKDGKKFKLEAPDADELPRAEFDPGQDTY

SEQ ID NO: 209538 - protein, 4 aa, Artificial Sequence
  Description of Artificial Sequence: Synthetic Linker
LVLE

SEQ ID NO: 209539 - protein, 4 aa, Artificial Sequence
  Description of Artificial Sequence: Synthetic Linker
SESG

SEQ ID NO: 209540 - protein, 5 aa, Artificial Sequence
  Description of Artificial Sequence: Synthetic Linker
EISGM

SEQ ID NO: 209541 - protein, 5 aa, Artificial Sequence
  Description of Artificial Sequence: Synthetic Linker
FAARS

SEQ ID NO: 209542 - protein, 7 aa, Artificial Sequence
  Description of Artificial Sequence: Synthetic Linker
QKSGKGL

SEQ ID NO: 209543 - protein, 11 aa, Artificial Sequence
  Description of Artificial Sequence: Synthetic Linker
GEVFPQKKVSA

SEQ ID NO: 209544 - protein, 13 aa, Artificial Sequence
  Description of Artificial Sequence: Synthetic Linker
KHPAVRKEPGPGL

SEQ ID NO: 209545 - protein, 14 aa, Artificial Sequence
  Description of Artificial Sequence: Synthetic Linker
YPHWEGEIIRFETE

SEQ ID NO: 209546 - protein, 9 aa, Artificial Sequence
  Description of Artificial Sequence: Synthetic Linker
EYPALGEVF

SEQ ID NO: 209547 - protein, 7 aa, Artificial Sequence
  Description of Artificial Sequence: Synthetic Linker
QDDDCTP

SEQ ID NO: 209548 - protein, 4 aa, Artificial Sequence
  Description of Artificial Sequence: Synthetic Linker
HNGK

SEQ ID NO: 209549 - protein, 5 aa, Artificial Sequence
  Description of Artificial Sequence: Synthetic Linker
SSVSR

SEQ ID NO: 209550 - protein, 6 aa, Artificial Sequence
  Description of Artificial Sequence: Synthetic Linker
AAHPVG

SEQ ID NO: 209551 - protein, 6 aa, Artificial Sequence
  Description of Artificial Sequence: Synthetic Linker
ARFDVT

SEQ ID NO: 209552 - protein, 6 aa, Artificial Sequence
  Description of Artificial Sequence: Synthetic Linker
EGRDMN

SEQ ID NO: 209553 - protein, 6 aa, Artificial Sequence
  Description of Artificial Sequence: Synthetic Linker
KFLRTE

SEQ ID NO: 209554 - protein, 8 aa, Artificial Sequence
  Description of Artificial Sequence: Synthetic Linker
LDLFYNTP

SEQ ID NO: 209555 - protein, 8 aa, Artificial Sequence
  Description of Artificial Sequence: Synthetic Linker
RTAEQQEA

SEQ ID NO: 209556 - protein, 11 aa, Artificial Sequence
  Description of Artificial Sequence: Synthetic Linker
YRAVPEGGQKE

SEQ ID NO: 209557 - protein, 8 aa, Artificial Sequence
  Description of Artificial Sequence: Synthetic Linker
HDPRRFGR

SEQ ID NO: 209558 - protein, 10 aa, Artificial Sequence
  Description of Artificial Sequence: Synthetic Linker
RRGDYREIPL

SEQ ID NO: 209559 - protein, 11 aa, Artificial Sequence
  Description of Artificial Sequence: Synthetic Linker
RHAVYGREGLP

SEQ ID NO: 209560 - protein, 23 aa, Artificial Sequence
  Description of Artificial Sequence: Synthetic Linker
ELGGSTLSDQSYRQPDGLPGGFQ

SEQ ID NO: 209561 - protein, 6 aa, Artificial Sequence
  Description of Artificial Sequence: Synthetic Linker
ESGKTS

SEQ ID NO: 209562 - protein, 7 aa, Artificial Sequence
  Description of Artificial Sequence: Synthetic Linker
FLDIHNI

SEQ ID NO: 209563 - protein, 7 aa, Artificial Sequence
  Description of Artificial Sequence: Synthetic Linker
VYPNIEE

SEQ ID NO: 209564 - protein, 9 aa, Artificial Sequence
  Description of Artificial Sequence: Synthetic Linker
RQGIPNESW

SEQ ID NO: 209565 - protein, 17 aa, Artificial Sequence
  Description of Artificial Sequence: Synthetic Linker
TKINERYELCDTYPALL

SEQ ID NO: 209566 - protein, 4 aa, Artificial Sequence
  Description of Artificial Sequence: Synthetic Linker
NGIV

SEQ ID NO: 209567 - protein, 5 aa, Artificial Sequence
  Description of Artificial Sequence: Synthetic Linker
SRRVP

SEQ ID NO: 209568 - protein, 17 aa, Artificial Sequence
  Description of Artificial Sequence: Synthetic Linker
LEKEKQFEKYSELKGTV

SEQ ID NO: 209569 - protein, 12 aa, Artificial Sequence
  Description of Artificial Sequence: Synthetic Linker
KDSPKGVGRPTK

SEQ ID NO: 209570 - protein, 4 aa, Artificial Sequence
  Description of Artificial Sequence: Synthetic Linker
ILIP

SEQ ID NO: 209571 - protein, 4 aa, Artificial Sequence
  Description of Artificial Sequence: Synthetic Linker
LAPA

SEQ ID NO: 209572 - protein, 5 aa, Artificial Sequence
  Description of Artificial Sequence: Synthetic Linker
CSGEY

SEQ ID NO: 209573 - protein, 5 aa, Artificial Sequence
  Description of Artificial Sequence: Synthetic Linker
STPHP

SEQ ID NO: 209574 - protein, 5 aa, Artificial Sequence
  Description of Artificial Sequence: Synthetic Linker
WGCDK

SEQ ID NO: 209575 - protein, 6 aa, Artificial Sequence
  Description of Artificial Sequence: Synthetic Linker
YFAMDE

SEQ ID NO: 209576 - protein, 9 aa, Artificial Sequence
  Description of Artificial Sequence: Synthetic Linker
RAETIDDIR

SEQ ID NO: 209577 - protein, 6 aa, Artificial Sequence
  Description of Artificial Sequence: Synthetic Linker
NDDIQG

SEQ ID NO: 209578 - protein, 7 aa, Artificial Sequence
  Description of Artificial Sequence: Synthetic Linker
YREKYCT

SEQ ID NO: 209579 - protein, 4 aa, Artificial Sequence
  Description of Artificial Sequence: Synthetic Linker
DADL

SEQ ID NO: 209580 - protein, 4 aa, Artificial Sequence
  Description of Artificial Sequence: Synthetic Linker
PNTA

SEQ ID NO: 209581 - protein, 5 aa, Artificial Sequence
  Description of Artificial Sequence: Synthetic Linker
VAVGV

SEQ ID NO: 209582 - protein, 6 aa, Artificial Sequence
  Description of Artificial Sequence: Synthetic Linker
VNIALA

SEQ ID NO: 209583 - protein, 17 aa, Artificial Sequence
  Description of Artificial Sequence: Synthetic Linker
KNLEEPVKPFPGVQGSS

SEQ ID NO: 209584 - protein, 26 aa, Artificial Sequence
  Description of Artificial Sequence: Synthetic Linker
LKGTLELHPNGLIKTDEYMRTSEPDV

SEQ ID NO: 209585 - protein, 6 aa, Artificial Sequence
  Description of Artificial Sequence: Synthetic Linker
YYPQIA

SEQ ID NO: 209586 - protein, 4 aa, Artificial Sequence
  Description of Artificial Sequence: Synthetic Linker
LGDA

SEQ ID NO: 209587 - protein, 7 aa, Artificial Sequence
  Description of Artificial Sequence: Synthetic Linker
FKHSGGL

SEQ ID NO: 209588 - protein, 20 aa, Artificial Sequence
  Description of Artificial Sequence: Synthetic Linker
FEAERKENCPACSQLPQNIQ

SEQ ID NO: 209589 - protein, 8 aa, Artificial Sequence
  Description of Artificial Sequence: Synthetic Linker
YGLDTINK

SEQ ID NO: 209590 - protein, 9 aa, Artificial Sequence
  Description of Artificial Sequence: Synthetic Linker
SMDNPDNEI

SEQ ID NO: 209591 - protein, 10 aa, Artificial Sequence
  Description of Artificial Sequence: Synthetic Linker
QQGRYPGVSN

SEQ ID NO: 209592 - protein, 8 aa, Artificial Sequence
  Description of Artificial Sequence: Synthetic Linker
TKLQNPDL

SEQ ID NO: 209593 - protein, 10 aa, Artificial Sequence
  Description of Artificial Sequence: Synthetic Linker
GGRGYGSESG

SEQ ID NO: 209594 - protein, 12 aa, Artificial Sequence
  Description of Artificial Sequence: Synthetic Linker
LQQHRPSPELTL

SEQ ID NO: 209595 - protein, 17 aa, Artificial Sequence
  Description of Artificial Sequence: Synthetic Linker
LGGKWQPGRGPCVLQEY

SEQ ID NO: 209596 - protein, 5 aa, Artificial Sequence
  Description of Artificial Sequence: Synthetic Linker
YQKLT

SEQ ID NO: 209597 - protein, 7 aa, Artificial Sequence
  Description of Artificial Sequence: Synthetic Linker
FISNQTI

SEQ ID NO: 209598 - protein, 7 aa, Artificial Sequence
  Description of Artificial Sequence: Synthetic Linker
SWEGNPI

SEQ ID NO: 209599 - protein, 8 aa, Artificial Sequence
  Description of Artificial Sequence: Synthetic Linker
FREVVSPQ

SEQ ID NO: 209600 - protein, 9 aa, Artificial Sequence
  Description of Artificial Sequence: Synthetic Linker
LADVPSSPY

SEQ ID NO: 209601 - protein, 4 aa, Artificial Sequence
  Description of Artificial Sequence: Synthetic Linker
FVSA

SEQ ID NO: 209602 - protein, 4 aa, Artificial Sequence
  Description of Artificial Sequence: Synthetic Linker
HKRS

SEQ ID NO: 209603 - protein, 5 aa, Artificial Sequence
  Description of Artificial Sequence: Synthetic Linker
KAAPD

SEQ ID NO: 209604 - protein, 19 aa, Artificial Sequence
  Description of Artificial Sequence: Synthetic Linker
PLDSPDETEDPEPNYAGEP

SEQ ID NO: 209605 - protein, 6 aa, Artificial Sequence
  Description of Artificial Sequence: Synthetic Linker
EVGNEE

SEQ ID NO: 209606 - protein, 13 aa, Artificial Sequence
  Description of Artificial Sequence: Synthetic Linker
ALPDEETGLELNE

SEQ ID NO: 209607 - protein, 4 aa, Artificial Sequence
  Description of Artificial Sequence: Synthetic Linker
QVDA

SEQ ID NO: 209608 - protein, 5 aa, Artificial Sequence
  Description of Artificial Sequence: Synthetic Linker
WRKDP

SEQ ID NO: 209609 - protein, 6 aa, Artificial Sequence
  Description of Artificial Sequence: Synthetic Linker
PSHGII

SEQ ID NO: 209610 - protein, 7 aa, Artificial Sequence
  Description of Artificial Sequence: Synthetic Linker
EGQGKAK

SEQ ID NO: 209611 - protein, 8 aa, Artificial Sequence
  Description of Artificial Sequence: Synthetic Linker
KINLAIKT

SEQ ID NO: 209612 - protein, 8 aa, Artificial Sequence
  Description of Artificial Sequence: Synthetic Linker
TEMYDTPT

SEQ ID NO: 209613 - protein, 6 aa, Artificial Sequence
  Description of Artificial Sequence: Synthetic Linker
AHELPM

SEQ ID NO: 209614 - protein, 12 aa, Artificial Sequence
  Description of Artificial Sequence: Synthetic Linker
EKPKGRDSKKVR

SEQ ID NO: 209615 - protein, 14 aa, Artificial Sequence
  Description of Artificial Sequence: Synthetic Linker
IEGTSPEIVVNPVR

SEQ ID NO: 209616 - protein, 7 aa, Artificial Sequence
  Description of Artificial Sequence: Synthetic Linker
QRTKVQI

SEQ ID NO: 209617 - protein, 26 aa, Artificial Sequence
  Description of Artificial Sequence: Synthetic Linker
VDMGFDTSKLGSYQRVAEPVVPPQEM

SEQ ID NO: 209618 - protein, 5 aa, Artificial Sequence
  Description of Artificial Sequence: Synthetic Linker
MNAHI

SEQ ID NO: 209619 - protein, 6 aa, Artificial Sequence
  Description of Artificial Sequence: Synthetic Linker
ADDYQA

SEQ ID NO: 209620 - protein, 6 aa, Artificial Sequence
  Description of Artificial Sequence: Synthetic Linker
YEGFTG

SEQ ID NO: 209621 - protein, 7 aa, Artificial Sequence
  Description of Artificial Sequence: Synthetic Linker
QVDDPLK

SEQ ID NO: 209622 - protein, 11 aa, Artificial Sequence
  Description of Artificial Sequence: Synthetic Linker
YKPKRFEYVTW

SEQ ID NO: 209623 - protein, 13 aa, Artificial Sequence
  Description of Artificial Sequence: Synthetic Linker
ILPLWHHDDTYLF

SEQ ID NO: 209624 - protein, 22 aa, Artificial Sequence
  Description of Artificial Sequence: Synthetic Linker
DMILPKKSVSKVKQTQLLTTEG

SEQ ID NO: 209625 - protein, 4 aa, Artificial Sequence
  Description of Artificial Sequence: Synthetic Linker
IDNP

SEQ ID NO: 209626 - protein, 4 aa, Artificial Sequence
  Description of Artificial Sequence: Synthetic Linker
GMDH

SEQ ID NO: 209627 - protein, 4 aa, Artificial Sequence
  Description of Artificial Sequence: Synthetic Linker
IGDC

SEQ ID NO: 209628 - protein, 5 aa, Artificial Sequence
  Description of Artificial Sequence: Synthetic Linker
EGVLH

SEQ ID NO: 209629 - protein, 5 aa, Artificial Sequence
  Description of Artificial Sequence: Synthetic Linker
NQKEL

SEQ ID NO: 209630 - protein, 5 aa, Artificial Sequence
  Description of Artificial Sequence: Synthetic Linker
QGNAL

SEQ ID NO: 209631 - protein, 5 aa, Artificial Sequence
  Description of Artificial Sequence: Synthetic Linker
QSGYQ

SEQ ID NO: 209632 - protein, 6 aa, Artificial Sequence
  Description of Artificial Sequence: Synthetic Linker
ARPDDE

SEQ ID NO: 209633 - protein, 6 aa, Artificial Sequence
  Description of Artificial Sequence: Synthetic Linker
MGVSAI

SEQ ID NO: 209634 - protein, 6 aa, Artificial Sequence
  Description of Artificial Sequence: Synthetic Linker
RNFQGY

SEQ ID NO: 209635 - protein, 7 aa, Artificial Sequence
  Description of Artificial Sequence: Synthetic Linker
TTQGDTD

SEQ ID NO: 209636 - protein, 5 aa, Artificial Sequence
  Description of Artificial Sequence: Synthetic Linker
IRDAN

SEQ ID NO: 209637 - protein, 7 aa, Artificial Sequence
  Description of Artificial Sequence: Synthetic Linker
YARPSSA

SEQ ID NO: 209638 - protein, 4 aa, Artificial Sequence
  Description of Artificial Sequence: Synthetic Linker
RGKF

SEQ ID NO: 209639 - protein, 4 aa, Artificial Sequence
  Description of Artificial Sequence: Synthetic Linker
THAV

SEQ ID NO: 209640 - protein, 5 aa, Artificial Sequence
  Description of Artificial Sequence: Synthetic Linker
ETPKI

SEQ ID NO: 209641 - protein, 5 aa, Artificial Sequence
  Description of Artificial Sequence: Synthetic Linker
SDTAN

SEQ ID NO: 209642 - protein, 7 aa, Artificial Sequence
  Description of Artificial Sequence: Synthetic Linker
TKQLAPT

SEQ ID NO: 209643 - protein, 10 aa, Artificial Sequence
  Description of Artificial Sequence: Synthetic Linker
AGDYKNLGGE

SEQ ID NO: 209644 - protein, 19 aa, Artificial Sequence
  Description of Artificial Sequence: Synthetic Linker
TYYTFNFSLEGAKMSLPGT

SEQ ID NO: 209645 - protein, 5 aa, Artificial Sequence
  Description of Artificial Sequence: Synthetic Linker
YNKSS

SEQ ID NO: 209646 - protein, 8 aa, Artificial Sequence
  Description of Artificial Sequence: Synthetic Linker
YGTPDYKY

SEQ ID NO: 209647 - protein, 11 aa, Artificial Sequence
  Description of Artificial Sequence: Synthetic Linker
PYGKAHTLGLK

SEQ ID NO: 209648 - protein, 6 aa, Artificial Sequence
  Description of Artificial Sequence: Synthetic Linker
DTEEKK

SEQ ID NO: 209649 - protein, 19 aa, Artificial Sequence
  Description of Artificial Sequence: Synthetic Linker
DIPNRRRKVSKHKHANFYP

SEQ ID NO: 209650 - protein, 6 aa, Artificial Sequence
  Description of Artificial Sequence: Synthetic Linker
PCSHVV

SEQ ID NO: 209651 - protein, 6 aa, Artificial Sequence
  Description of Artificial Sequence: Synthetic Linker
ANENGT

SEQ ID NO: 209652 - protein, 6 aa, Artificial Sequence
  Description of Artificial Sequence: Synthetic Linker
NRKNNI

SEQ ID NO: 209653 - protein, 8 aa, Artificial Sequence
  Description of Artificial Sequence: Synthetic Linker
LAPEDYTG

SEQ ID NO: 209654 - protein, 4 aa, Artificial Sequence
  Description of Artificial Sequence: Synthetic Linker
IGGK

SEQ ID NO: 209655 - protein, 4 aa, Artificial Sequence
  Description of Artificial Sequence: Synthetic Linker
VGDD

SEQ ID NO: 209656 - protein, 6 aa, Artificial Sequence
  Description of Artificial Sequence: Synthetic Linker
INTTKY

SEQ ID NO: 209657 - protein, 7 aa, Artificial Sequence
  Description of Artificial Sequence: Synthetic Linker
AATVTGY

SEQ ID NO: 209658 - protein, 7 aa, Artificial Sequence
  Description of Artificial Sequence: Synthetic Linker
GGADGKT

SEQ ID NO: 209659 - protein, 7 aa, Artificial Sequence
  Description of Artificial Sequence: Synthetic Linker
QNKDGSI

SEQ ID NO: 209660 - protein, 7 aa, Artificial Sequence
  Description of Artificial Sequence: Synthetic Linker
TDNNGKT

SEQ ID NO: 209661 - protein, 8 aa, Artificial Sequence
  Description of Artificial Sequence: Synthetic Linker
AAGVTGTA

SEQ ID NO: 209662 - protein, 9 aa, Artificial Sequence
  Description of Artificial Sequence: Synthetic Linker
QVGANDGET

SEQ ID NO: 209663 - protein, 11 aa, Artificial Sequence
  Description of Artificial Sequence: Synthetic Linker
TADDGTSKTAL

SEQ ID NO: 209664 - protein, 21 aa, Artificial Sequence
  Description of Artificial Sequence: Synthetic Linker
LKQINSQTLGLDTLNVQQKYK

SEQ ID NO: 209665 - protein, 23 aa, Artificial Sequence
  Description of Artificial Sequence: Synthetic Linker
AEGHNFKAQPDLAEAAATTTENP

SEQ ID NO: 209666 - protein, 4 aa, Artificial Sequence
  Description of Artificial Sequence: Synthetic Linker
AGAR

SEQ ID NO: 209667 - protein, 5 aa, Artificial Sequence
  Description of Artificial Sequence: Synthetic Linker
AEALL

SEQ ID NO: 209668 - protein, 6 aa, Artificial Sequence
  Description of Artificial Sequence: Synthetic Linker
AWPEEV

SEQ ID NO: 209669 - protein, 6 aa, Artificial Sequence
  Description of Artificial Sequence: Synthetic Linker
NRGVEA

SEQ ID NO: 209670 - protein, 8 aa, Artificial Sequence
  Description of Artificial Sequence: Synthetic Linker
EALPLPFA

SEQ ID NO: 209671 - protein, 8 aa, Artificial Sequence
  Description of Artificial Sequence: Synthetic Linker
RGVDPLGQ

SEQ ID NO: 209672 - protein, 9 aa, Artificial Sequence
  Description of Artificial Sequence: Synthetic Linker
LEVTPNRPD

SEQ ID NO: 209673 - protein, 9 aa, Artificial Sequence
  Description of Artificial Sequence: Synthetic Linker
VEDPEGAPH

SEQ ID NO: 209674 - protein, 10 aa, Artificial Sequence
  Description of Artificial Sequence: Synthetic Linker
AGSPKPPEAI

SEQ ID NO: 209675 - protein, 10 aa, Artificial Sequence
  Description of Artificial Sequence: Synthetic Linker
FGLRVAPSPL

SEQ ID NO: 209676 - protein, 13 aa, Artificial Sequence
  Description of Artificial Sequence: Synthetic Linker
TIPLALPAFFPAP

SEQ ID NO: 209677 - protein, 14 aa, Artificial Sequence
  Description of Artificial Sequence: Synthetic Linker
LGYALVEPEAALKA

SEQ ID NO: 209678 - protein, 19 aa, Artificial Sequence
  Description of Artificial Sequence: Synthetic Linker
LPLPDKPLAFQDPSRHPAA

SEQ ID NO: 209679 - protein, 5 aa, Artificial Sequence
  Description of Artificial Sequence: Synthetic Linker
GLQSA

SEQ ID NO: 209680 - protein, 6 aa, Artificial Sequence
  Description of Artificial Sequence: Synthetic Linker
HGELTR

SEQ ID NO: 209681 - protein, 7 aa, Artificial Sequence
  Description of Artificial Sequence: Synthetic Linker
LKDKQLN

SEQ ID NO: 209682 - protein, 5 aa, Artificial Sequence
  Description of Artificial Sequence: Synthetic Linker
FYPQY

SEQ ID NO: 209683 - protein, 7 aa, Artificial Sequence
  Description of Artificial Sequence: Synthetic Linker
DFHYDEK

SEQ ID NO: 209684 - protein, 10 aa, Artificial Sequence
  Description of Artificial Sequence: Synthetic Linker
DYLLDFSAVY

SEQ ID NO: 209685 - protein, 10 aa, Artificial Sequence
  Description of Artificial Sequence: Synthetic Linker
PLDVTNRPRT

SEQ ID NO: 209686 - protein, 17 aa, Artificial Sequence
  Description of Artificial Sequence: Synthetic Linker
NGEYSLKSAVKLPNVLS

SEQ ID NO: 209687 - protein, 6 aa, Artificial Sequence
  Description of Artificial Sequence: Synthetic Linker
DRRAGL

SEQ ID NO: 209688 - protein, 7 aa, Artificial Sequence
  Description of Artificial Sequence: Synthetic Linker
FLASMDE

SEQ ID NO: 209689 - protein, 8 aa, Artificial Sequence
  Description of Artificial Sequence: Synthetic Linker
IMRETINV

SEQ ID NO: 209690 - protein, 11 aa, Artificial Sequence
  Description of Artificial Sequence: Synthetic Linker
RFPNARTSYTM

SEQ ID NO: 209691 - protein, 6 aa, Artificial Sequence
  Description of Artificial Sequence: Synthetic Linker
SDPAKV

SEQ ID NO: 209692 - protein, 11 aa, Artificial Sequence
  Description of Artificial Sequence: Synthetic Linker
TSNGASCMPSM

SEQ ID NO: 209693 - protein, 12 aa, Artificial Sequence
  Description of Artificial Sequence: Synthetic Linker
AGSAPAEPTGDV

SEQ ID NO: 209694 - protein, 7 aa, Artificial Sequence
  Description of Artificial Sequence: Synthetic Linker
MRVKNDF

SEQ ID NO: 209695 - protein, 14 aa, Artificial Sequence
  Description of Artificial Sequence: Synthetic Linker
YEGKDVHIKEDERY

SEQ ID NO: 209696 - protein, 15 aa, Artificial Sequence
  Description of Artificial Sequence: Synthetic Linker
LGLKIIDLSAIQDEV

SEQ ID NO: 209697 - protein, 5 aa, Artificial Sequence
  Description of Artificial Sequence: Synthetic Linker
LEPSR

SEQ ID NO: 209698 - protein, 6 aa, Artificial Sequence
  Description of Artificial Sequence: Synthetic Linker
CSNVAA

SEQ ID NO: 209699 - protein, 8 aa, Artificial Sequence
  Description of Artificial Sequence: Synthetic Linker
QKVTINPV

SEQ ID NO: 209700 - protein, 11 aa, Artificial Sequence
  Description of Artificial Sequence: Synthetic Linker
ALPPGAAKQQL

SEQ ID NO: 209701 - protein, 11 aa, Artificial Sequence
  Description of Artificial Sequence: Synthetic Linker
ALRRGTAGSVT

SEQ ID NO: 209702 - protein, 16 aa, Artificial Sequence
  Description of Artificial Sequence: Synthetic Linker
ESFGATNTNARENTPF

SEQ ID NO: 209703 - protein, 4 aa, Artificial Sequence
  Description of Artificial Sequence: Synthetic Linker
DCDY

SEQ ID NO: 209704 - protein, 4 aa, Artificial Sequence
  Description of Artificial Sequence: Synthetic Linker
DWSD

SEQ ID NO: 209705 - protein, 4 aa, Artificial Sequence
  Description of Artificial Sequence: Synthetic Linker
FAGQ

SEQ ID NO: 209706 - protein, 4 aa, Artificial Sequence
  Description of Artificial Sequence: Synthetic Linker
HEGV

SEQ ID NO: 209707 - protein, 4 aa, Artificial Sequence
  Description of Artificial Sequence: Synthetic Linker
RDGE

SEQ ID NO: 209708 - protein, 4 aa, Artificial Sequence
  Description of Artificial Sequence: Synthetic Linker
SATR

SEQ ID NO: 209709 - protein, 4 aa, Artificial Sequence
  Description of Artificial Sequence: Synthetic Linker
SIPA

SEQ ID NO: 209710 - protein, 4 aa, Artificial Sequence
  Description of Artificial Sequence: Synthetic Linker
VYGQ

SEQ ID NO: 209711 - protein, 5 aa, Artificial Sequence
  Description of Artificial Sequence: Synthetic Linker
ACGAT

SEQ ID NO: 209712 - protein, 5 aa, Artificial Sequence
  Description of Artificial Sequence: Synthetic Linker
VYQAA

SEQ ID NO: 209713 - protein, 6 aa, Artificial Sequence
  Description of Artificial Sequence: Synthetic Linker
EAGVDR

SEQ ID NO: 209714 - protein, 6 aa, Artificial Sequence
  Description of Artificial Sequence: Synthetic Linker
SGGKTV

SEQ ID NO: 209715 - protein, 7 aa, Artificial Sequence
  Description of Artificial Sequence: Synthetic Linker
VPLSEKV

SEQ ID NO: 209716 - protein, 8 aa, Artificial Sequence
  Description of Artificial Sequence: Synthetic Linker
ANHPRGFA

SEQ ID NO: 209717 - protein, 9 aa, Artificial Sequence
  Description of Artificial Sequence: Synthetic Linker
HDLQGERPY

SEQ ID NO: 209718 - protein, 10 aa, Artificial Sequence
  Description of Artificial Sequence: Synthetic Linker
GCDGFHGISR

SEQ ID NO: 209719 - protein, 11 aa, Artificial Sequence
  Description of Artificial Sequence: Synthetic Linker
ADTPPVSHELI

SEQ ID NO: 209720 - protein, 4 aa, Artificial Sequence
  Description of Artificial Sequence: Synthetic Linker
GHRQ

SEQ ID NO: 209721 - protein, 4 aa, Artificial Sequence
  Description of Artificial Sequence: Synthetic Linker
LTGA

SEQ ID NO: 209722 - protein, 6 aa, Artificial Sequence
  Description of Artificial Sequence: Synthetic Linker
ALPSEL

SEQ ID NO: 209723 - protein, 6 aa, Artificial Sequence
  Description of Artificial Sequence: Synthetic Linker
RAGGSI

SEQ ID NO: 209724 - protein, 6 aa, Artificial Sequence
  Description of Artificial Sequence: Synthetic Linker
VSADNV

SEQ ID NO: 209725 - protein, 11 aa, Artificial Sequence
  Description of Artificial Sequence: Synthetic Linker
HTQTDTSSPDP

SEQ ID NO: 209726 - protein, 12 aa, Artificial Sequence
  Description of Artificial Sequence: Synthetic Linker
LKREKQDESCSL

SEQ ID NO: 209727 - protein, 13 aa, Artificial Sequence
  Description of Artificial Sequence: Synthetic Linker
FNPLKTGVCQLDN

SEQ ID NO: 209728 - protein, 4 aa, Artificial Sequence
  Description of Artificial Sequence: Synthetic Linker
ALGI

SEQ ID NO: 209729 - protein, 4 aa, Artificial Sequence
  Description of Artificial Sequence: Synthetic Linker
NLRS

SEQ ID NO: 209730 - protein, 6 aa, Artificial Sequence
  Description of Artificial Sequence: Synthetic Linker
EIPKPS

SEQ ID NO: 209731 - protein, 7 aa, Artificial Sequence
  Description of Artificial Sequence: Synthetic Linker
EKMVEPQ

SEQ ID NO: 209732 - protein, 10 aa, Artificial Sequence
  Description of Artificial Sequence: Synthetic Linker
KSKVYTRTPT

SEQ ID NO: 209733 - protein, 6 aa, Artificial Sequence
  Description of Artificial Sequence: Synthetic Linker
ELVPKP

SEQ ID NO: 209734 - protein, 6 aa, Artificial Sequence
  Description of Artificial Sequence: Synthetic Linker
FGFPGG

SEQ ID NO: 209735 - protein, 6 aa, Artificial Sequence
  Description of Artificial Sequence: Synthetic Linker
LRNLDE

SEQ ID NO: 209736 - protein, 7 aa, Artificial Sequence
  Description of Artificial Sequence: Synthetic Linker
FSNKKSW

SEQ ID NO: 209737 - protein, 7 aa, Artificial Sequence
  Description of Artificial Sequence: Synthetic Linker
LFEKNDF

SEQ ID NO: 209738 - protein, 7 aa, Artificial Sequence
  Description of Artificial Sequence: Synthetic Linker
LYPNACS

SEQ ID NO: 209739 - protein, 7 aa, Artificial Sequence
  Description of Artificial Sequence: Synthetic Linker
RRAVYAN

SEQ ID NO: 209740 - protein, 7 aa, Artificial Sequence
  Description of Artificial Sequence: Synthetic Linker
RSHRMPV

SEQ ID NO: 209741 - protein, 8 aa, Artificial Sequence
  Description of Artificial Sequence: Synthetic Linker
EWNWPQPV

SEQ ID NO: 209742 - protein, 16 aa, Artificial Sequence
  Description of Artificial Sequence: Synthetic Linker
ITPAYPSMCATHNITE

SEQ ID NO: 209743 - protein, 16 aa, Artificial Sequence
  Description of Artificial Sequence: Synthetic Linker
RLDQPQVPLSLTLSDK

SEQ ID NO: 209744 - protein, 21 aa, Artificial Sequence
  Description of Artificial Sequence: Synthetic Linker
ILKPIEDGPLQVRVWNPKIYA

SEQ ID NO: 209745 - protein, 16 aa, Artificial Sequence
  Description of Artificial Sequence: Synthetic Linker
ISSSMTNSTAASRPPV

SEQ ID NO: 209746 - protein, 5 aa, Artificial Sequence
  Description of Artificial Sequence: Synthetic Linker
ELVTV

SEQ ID NO: 209747 - protein, 11 aa, Artificial Sequence
  Description of Artificial Sequence: Synthetic Linker
HDDLWQTLPDP

SEQ ID NO: 209748 - protein, 4 aa, Artificial Sequence
  Description of Artificial Sequence: Synthetic Linker
QGTN

SEQ ID NO: 209749 - protein, 16 aa, Artificial Sequence
  Description of Artificial Sequence: Synthetic Linker
NVYPELRVPDHQDIAF

SEQ ID NO: 209750 - protein, 6 aa, Artificial Sequence
  Description of Artificial Sequence: Synthetic Linker
QLSVNQ

SEQ ID NO: 209751 - protein, 8 aa, Artificial Sequence
  Description of Artificial Sequence: Synthetic Linker
DKAQFRNG

SEQ ID NO: 209752 - protein, 13 aa, Artificial Sequence
  Description of Artificial Sequence: Synthetic Linker
ENPYRPVTFDYLM

SEQ ID NO: 209753 - protein, 27 aa, Artificial Sequence
  Description of Artificial Sequence: Synthetic Linker
DYGNSPLHRFKKPGSKNFQNIFPPSAT

SEQ ID NO: 209754 - protein, 10 aa, Artificial Sequence
  Description of Artificial Sequence: Synthetic Linker
FKPLPAQESE

SEQ ID NO: 209755 - protein, 7 aa, Artificial Sequence
  Description of Artificial Sequence: Synthetic Linker
KAAGLEM

SEQ ID NO: 209756 - protein, 8 aa, Artificial Sequence
  Description of Artificial Sequence: Synthetic Linker
EIPPQAII

SEQ ID NO: 209757 - protein, 27 aa, Artificial Sequence
  Description of Artificial Sequence: Synthetic Linker
ESGEPSSLPRPATHWPFKTAFQHHYLV

SEQ ID NO: 209758 - protein, 8 aa, Artificial Sequence
  Description of Artificial Sequence: Synthetic Linker
EVHYARPI

SEQ ID NO: 209759 - protein, 4 aa, Artificial Sequence
  Description of Artificial Sequence: Synthetic Linker
LGTA

SEQ ID NO: 209760 - protein, 5 aa, Artificial Sequence
  Description of Artificial Sequence: Synthetic Linker
LGRRF

SEQ ID NO: 209761 - protein, 6 aa, Artificial Sequence
  Description of Artificial Sequence: Synthetic Linker
ANTDNT

SEQ ID NO: 209762 - protein, 6 aa, Artificial Sequence
  Description of Artificial Sequence: Synthetic Linker
KRTIPA

SEQ ID NO: 209763 - protein, 7 aa, Artificial Sequence
  Description of Artificial Sequence: Synthetic Linker
AIDDSNI

SEQ ID NO: 209764 - protein, 7 aa, Artificial Sequence
  Description of Artificial Sequence: Synthetic Linker
PLTKTDV

SEQ ID NO: 209765 - protein, 8 aa, Artificial Sequence
  Description of Artificial Sequence: Synthetic Linker
NYLVSDGI

SEQ ID NO: 209766 - protein, 9 aa, Artificial Sequence
  Description of Artificial Sequence: Synthetic Linker
LLDDEGFNW

SEQ ID NO: 209767 - protein, 25 aa, Artificial Sequence
  Description of Artificial Sequence: Synthetic Linker
WSRLKAKDWGSSSGSQGREDSVLSY

SEQ ID NO: 209768 - protein, 4 aa, Artificial Sequence
  Description of Artificial Sequence: Synthetic Linker
TKAE

SEQ ID NO: 209769 - protein, 4 aa, Artificial Sequence
  Description of Artificial Sequence: Synthetic Linker
TVAV

SEQ ID NO: 209770 - protein, 4 aa, Artificial Sequence
  Description of Artificial Sequence: Synthetic Linker
YRTM

SEQ ID NO: 209771 - protein, 5 aa, Artificial Sequence
  Description of Artificial Sequence: Synthetic Linker
ARTPL

SEQ ID NO: 209772 - protein, 5 aa, Artificial Sequence
  Description of Artificial Sequence: Synthetic Linker
DRPDL

SEQ ID NO: 209773 - protein, 5 aa, Artificial Sequence
  Description of Artificial Sequence: Synthetic Linker
TGTAK

SEQ ID NO: 209774 - protein, 5 aa, Artificial Sequence
  Description of Artificial Sequence: Synthetic Linker
VAMQK

SEQ ID NO: 209775 - protein, 5 aa, Artificial Sequence
  Description of Artificial Sequence: Synthetic Linker
YNMQV

SEQ ID NO: 209776 - protein, 6 aa, Artificial Sequence
  Description of Artificial Sequence: Synthetic Linker
FRMYEK

SEQ ID NO: 209777 - protein, 6 aa, Artificial Sequence
  Description of Artificial Sequence: Synthetic Linker
QAAKST

SEQ ID NO: 209778 - protein, 7 aa, Artificial Sequence
  Description of Artificial Sequence: Synthetic Linker
YMTGQPV

SEQ ID NO: 209779 - protein, 8 aa, Artificial Sequence
  Description of Artificial Sequence: Synthetic Linker
VVEDGQVV

SEQ ID NO: 209780 - protein, 10 aa, Artificial Sequence
  Description of Artificial Sequence: Synthetic Linker
KEGLEIQNES

SEQ ID NO: 209781 - protein, 11 aa, Artificial Sequence
  Description of Artificial Sequence: Synthetic Linker
AFGIDNLFDVK

SEQ ID NO: 209782 - protein, 11 aa, Artificial Sequence
  Description of Artificial Sequence: Synthetic Linker
TIPTNRPVVRD

SEQ ID NO: 209783 - protein, 15 aa, Artificial Sequence
  Description of Artificial Sequence: Synthetic Linker
VDSFTGRLMKGRRYS

SEQ ID NO: 209784 - protein, 24 aa, Artificial Sequence
  Description of Artificial Sequence: Synthetic Linker
VRTLKAEKDYTYDIKTKAVQLTEE

SEQ ID NO: 209785 - protein, 12 aa, Artificial Sequence
  Description of Artificial Sequence: Synthetic Linker
DLPPLEEGRYYY

SEQ ID NO: 209786 - protein, 18 aa, Artificial Sequence
  Description of Artificial Sequence: Synthetic Linker
HGTALEHRRVVSPYGHRF

SEQ ID NO: 209787 - protein, 7 aa, Artificial Sequence
  Description of Artificial Sequence: Synthetic Linker
AEANVEY

SEQ ID NO: 209788 - protein, 9 aa, Artificial Sequence
  Description of Artificial Sequence: Synthetic Linker
IPLVTGPGV

SEQ ID NO: 209789 - protein, 4 aa, Artificial Sequence
  Description of Artificial Sequence: Synthetic Linker
INDV

SEQ ID NO: 209790 - protein, 4 aa, Artificial Sequence
  Description of Artificial Sequence: Synthetic Linker
KARL

SEQ ID NO: 209791 - protein, 5 aa, Artificial Sequence
  Description of Artificial Sequence: Synthetic Linker
HPEHG

SEQ ID NO: 209792 - protein, 5 aa, Artificial Sequence
  Description of Artificial Sequence: Synthetic Linker
YIGKP

SEQ ID NO: 209793 - protein, 7 aa, Artificial Sequence
  Description of Artificial Sequence: Synthetic Linker
YGYRRLR

SEQ ID NO: 209794 - protein, 8 aa, Artificial Sequence
  Description of Artificial Sequence: Synthetic Linker
EYLKRPLI

SEQ ID NO: 209795 - protein, 8 aa, Artificial Sequence
  Description of Artificial Sequence: Synthetic Linker
FADLPRKY

SEQ ID NO: 209796 - protein, 8 aa, Artificial Sequence
  Description of Artificial Sequence: Synthetic Linker
SGLQDVAH

SEQ ID NO: 209797 - protein, 13 aa, Artificial Sequence
  Description of Artificial Sequence: Synthetic Linker
VGGGLSTNPMLAQ

SEQ ID NO: 209798 - protein, 15 aa, Artificial Sequence
  Description of Artificial Sequence: Synthetic Linker
DDVGLQTTEACGDCP

SEQ ID NO: 209799 - protein, 16 aa, Artificial Sequence
  Description of Artificial Sequence: Synthetic Linker
DGPAPEPVKHPIDHVG

SEQ ID NO: 209800 - protein, 16 aa, Artificial Sequence
  Description of Artificial Sequence: Synthetic Linker
GSPLAGESLDEVLDPT

SEQ ID NO: 209801 - protein, 4 aa, Artificial Sequence
  Description of Artificial Sequence: Synthetic Linker
EVRE

SEQ ID NO: 209802 - protein, 4 aa, Artificial Sequence
  Description of Artificial Sequence: Synthetic Linker
HGEV

SEQ ID NO: 209803 - protein, 4 aa, Artificial Sequence
  Description of Artificial Sequence: Synthetic Linker
KLPP

SEQ ID NO: 209804 - protein, 6 aa, Artificial Sequence
  Description of Artificial Sequence: Synthetic Linker
FGREGN

SEQ ID NO: 209805 - protein, 6 aa, Artificial Sequence
  Description of Artificial Sequence: Synthetic Linker
LGKGSS

SEQ ID NO: 209806 - protein, 6 aa, Artificial Sequence
  Description of Artificial Sequence: Synthetic Linker
PFPKDV

SEQ ID NO: 209807 - protein, 6 aa, Artificial Sequence
  Description of Artificial Sequence: Synthetic Linker
SEHFGE

SEQ ID NO: 209808 - protein, 6 aa, Artificial Sequence
  Description of Artificial Sequence: Synthetic Linker
YTGVRR

SEQ ID NO: 209809 - protein, 7 aa, Artificial Sequence
  Description of Artificial Sequence: Synthetic Linker
DTHTLDY

SEQ ID NO: 209810 - protein, 8 aa, Artificial Sequence
  Description of Artificial Sequence: Synthetic Linker
ESDYEVGG

SEQ ID NO: 209811 - protein, 11 aa, Artificial Sequence
  Description of Artificial Sequence: Synthetic Linker
GNLPLGAGLSS

SEQ ID NO: 209812 - protein, 13 aa, Artificial Sequence
  Description of Artificial Sequence: Synthetic Linker
FSLNDLRKENSWI

SEQ ID NO: 209813 - protein, 9 aa, Artificial Sequence
  Description of Artificial Sequence: Synthetic Linker
EHGLAPPDR

SEQ ID NO: 209814 - protein, 12 aa, Artificial Sequence
  Description of Artificial Sequence: Synthetic Linker
AYPQTPLLPRDP

SEQ ID NO: 209815 - protein, 5 aa, Artificial Sequence
  Description of Artificial Sequence: Synthetic Linker
QFATV

SEQ ID NO: 209816 - protein, 4 aa, Artificial Sequence
  Description of Artificial Sequence: Synthetic Linker
LLTA

SEQ ID NO: 209817 - protein, 6 aa, Artificial Sequence
  Description of Artificial Sequence: Synthetic Linker
ARHPLL

SEQ ID NO: 209818 - protein, 6 aa, Artificial Sequence
  Description of Artificial Sequence: Synthetic Linker
LGGLEV

SEQ ID NO: 209819 - protein, 6 aa, Artificial Sequence
  Description of Artificial Sequence: Synthetic Linker
WTEGWE

SEQ ID NO: 209820 - protein, 7 aa, Artificial Sequence
  Description of Artificial Sequence: Synthetic Linker
YDEGLTS

SEQ ID NO: 209821 - protein, 8 aa, Artificial Sequence
  Description of Artificial Sequence: Synthetic Linker
TLGLRSPV

SEQ ID NO: 209822 - protein, 14 aa, Artificial Sequence
  Description of Artificial Sequence: Synthetic Linker
HLDLSAPKLRLREE

SEQ ID NO: 209823 - protein, 21 aa, Artificial Sequence
  Description of Artificial Sequence: Synthetic Linker
YATEKEEPKPERTEVVAKLRR

SEQ ID NO: 209824 - protein, 6 aa, Artificial Sequence
  Description of Artificial Sequence: Synthetic Linker
ELGVSL

SEQ ID NO: 209825 - protein, 6 aa, Artificial Sequence
  Description of Artificial Sequence: Synthetic Linker
MSSKGT

SEQ ID NO: 209826 - protein, 7 aa, Artificial Sequence
  Description of Artificial Sequence: Synthetic Linker
LKLGRAF

SEQ ID NO: 209827 - protein, 8 aa, Artificial Sequence
  Description of Artificial Sequence: Synthetic Linker
GFNIEKFP

SEQ ID NO: 209828 - protein, 15 aa, Artificial Sequence
  Description of Artificial Sequence: Synthetic Linker
TAPLPGYNTEFASGI

SEQ ID NO: 209829 - protein, 22 aa, Artificial Sequence
  Description of Artificial Sequence: Synthetic Linker
CFRNEVGLPDSSKTEKVTSETV

SEQ ID NO: 209830 - protein, 4 aa, Artificial Sequence
  Description of Artificial Sequence: Synthetic Linker
KSRT

SEQ ID NO: 209831 - protein, 5 aa, Artificial Sequence
  Description of Artificial Sequence: Synthetic Linker
DRAGA

SEQ ID NO: 209832 - protein, 5 aa, Artificial Sequence
  Description of Artificial Sequence: Synthetic Linker
FYVSA

SEQ ID NO: 209833 - protein, 5 aa, Artificial Sequence
  Description of Artificial Sequence: Synthetic Linker
IATGG

SEQ ID NO: 209834 - protein, 5 aa, Artificial Sequence
  Description of Artificial Sequence: Synthetic Linker
IGGGT

SEQ ID NO: 209835 - protein, 5 aa, Artificial Sequence
  Description of Artificial Sequence: Synthetic Linker
LFRKI

SEQ ID NO: 209836 - protein, 5 aa, Artificial Sequence
  Description of Artificial Sequence: Synthetic Linker
PRSLS

SEQ ID NO: 209837 - protein, 5 aa, Artificial Sequence
  Description of Artificial Sequence: Synthetic Linker
TGKKV

SEQ ID NO: 209838 - protein, 6 aa, Artificial Sequence
  Description of Artificial Sequence: Synthetic Linker
DVRGNM

SEQ ID NO: 209839 - protein, 6 aa, Artificial Sequence
  Description of Artificial Sequence: Synthetic Linker
LNDGSQ

SEQ ID NO: 209840 - protein, 6 aa, Artificial Sequence
  Description of Artificial Sequence: Synthetic Linker
NIENGG

SEQ ID NO: 209841 - protein, 6 aa, Artificial Sequence
  Description of Artificial Sequence: Synthetic Linker
RDPGAR

SEQ ID NO: 209842 - protein, 6 aa, Artificial Sequence
  Description of Artificial Sequence: Synthetic Linker
SREVKS

SEQ ID NO: 209843 - protein, 7 aa, Artificial Sequence
  Description of Artificial Sequence: Synthetic Linker
RQWNGKE

SEQ ID NO: 209844 - protein, 7 aa, Artificial Sequence
  Description of Artificial Sequence: Synthetic Linker
SIYFQPP

SEQ ID NO: 209845 - protein, 8 aa, Artificial Sequence
  Description of Artificial Sequence: Synthetic Linker
VPQIRAPS

SEQ ID NO: 209846 - protein, 8 aa, Artificial Sequence
  Description of Artificial Sequence: Synthetic Linker
WFSDDPNV

SEQ ID NO: 209847 - protein, 11 aa, Artificial Sequence
  Description of Artificial Sequence: Synthetic Linker
SEDPELPYMRP

SEQ ID NO: 209848 - protein, 8 aa, Artificial Sequence
  Description of Artificial Sequence: Synthetic Linker
AFDGPFDE

SEQ ID NO: 209849 - protein, 6 aa, Artificial Sequence
  Description of Artificial Sequence: Synthetic Linker
HGDDRG

SEQ ID NO: 209850 - protein, 5 aa, Artificial Sequence
  Description of Artificial Sequence: Synthetic Linker
LRPSP

SEQ ID NO: 209851 - protein, 4 aa, Artificial Sequence
  Description of Artificial Sequence: Synthetic Linker
LNVA

SEQ ID NO: 209852 - protein, 6 aa, Artificial Sequence
  Description of Artificial Sequence: Synthetic Linker
LSTSQK

SEQ ID NO: 209853 - protein, 21 aa, Artificial Sequence
  Description of Artificial Sequence: Synthetic Linker
GAADIGLGYPNGNQGWGRVTL

SEQ ID NO: 209854 - protein, 4 aa, Artificial Sequence
  Description of Artificial Sequence: Synthetic Linker
YIGI

SEQ ID NO: 209855 - protein, 7 aa, Artificial Sequence
  Description of Artificial Sequence: Synthetic Linker
DGRVIRG

SEQ ID NO: 209856 - protein, 17 aa, Artificial Sequence
  Description of Artificial Sequence: Synthetic Linker
TLSFDKSNDGETPEGIG

SEQ ID NO: 209857 - protein, 18 aa, Artificial Sequence
  Description of Artificial Sequence: Synthetic Linker
EIAPLHAQGGGIDQLQGI

SEQ ID NO: 209858 - protein, 4 aa, Artificial Sequence
  Description of Artificial Sequence: Synthetic Linker
ANNG

SEQ ID NO: 209859 - protein, 4 aa, Artificial Sequence
  Description of Artificial Sequence: Synthetic Linker
ESNL

SEQ ID NO: 209860 - protein, 4 aa, Artificial Sequence
  Description of Artificial Sequence: Synthetic Linker
KISA

SEQ ID NO: 209861 - protein, 4 aa, Artificial Sequence
  Description of Artificial Sequence: Synthetic Linker
MDSA

SEQ ID NO: 209862 - protein, 4 aa, Artificial Sequence
  Description of Artificial Sequence: Synthetic Linker
MMTP

SEQ ID NO: 209863 - protein, 4 aa, Artificial Sequence
  Description of Artificial Sequence: Synthetic Linker
VGGI

SEQ ID NO: 209864 - protein, 5 aa, Artificial Sequence
  Description of Artificial Sequence: Synthetic Linker
YTQRL

SEQ ID NO: 209865 - protein, 6 aa, Artificial Sequence
  Description of Artificial Sequence: Synthetic Linker
AEKGKA

SEQ ID NO: 209866 - protein, 6 aa, Artificial Sequence
  Description of Artificial Sequence: Synthetic Linker
MIRVPV

SEQ ID NO: 209867 - protein, 7 aa, Artificial Sequence
  Description of Artificial Sequence: Synthetic Linker
SYTATED

SEQ ID NO: 209868 - protein, 8 aa, Artificial Sequence
  Description of Artificial Sequence: Synthetic Linker
ETINPAHP

SEQ ID NO: 209869 - protein, 8 aa, Artificial Sequence
  Description of Artificial Sequence: Synthetic Linker
SKFSGGNL

SEQ ID NO: 209870 - protein, 8 aa, Artificial Sequence
  Description of Artificial Sequence: Synthetic Linker
TAYFVDAP

SEQ ID NO: 209871 - protein, 9 aa, Artificial Sequence
  Description of Artificial Sequence: Synthetic Linker
ISPKEPHNK

SEQ ID NO: 209872 - protein, 9 aa, Artificial Sequence
  Description of Artificial Sequence: Synthetic Linker
LSDKPGNPV

SEQ ID NO: 209873 - protein, 9 aa, Artificial Sequence
  Description of Artificial Sequence: Synthetic Linker
RYPSITRDM

SEQ ID NO: 209874 - protein, 10 aa, Artificial Sequence
  Description of Artificial Sequence: Synthetic Linker
MLSQVPYFSR

SEQ ID NO: 209875 - protein, 11 aa, Artificial Sequence
  Description of Artificial Sequence: Synthetic Linker
APSRYFASEPK

SEQ ID NO: 209876 - protein, 14 aa, Artificial Sequence
  Description of Artificial Sequence: Synthetic Linker
HTLDAVNIADRYDA

SEQ ID NO: 209877 - protein, 31 aa, Artificial Sequence
  Description of Artificial Sequence: Synthetic Linker
ADIALSLPELNPYIPDDFSLIKSEKKYDHPE

SEQ ID NO: 209878 - protein, 7 aa, Artificial Sequence
  Description of Artificial Sequence: Synthetic Linker
DVQPMQY

SEQ ID NO: 209879 - protein, 11 aa, Artificial Sequence
  Description of Artificial Sequence: Synthetic Linker
HMSPSWTLLKL

SEQ ID NO: 209880 - protein, 8 aa, Artificial Sequence
  Description of Artificial Sequence: Synthetic Linker
LEMVSKPM

SEQ ID NO: 209881 - protein, 51 aa, Artificial Sequence
  Description of Artificial Sequence: Synthetic Linker
YGPKGKGKGMGAGTLSTDKGESLGIKYEEGQSHRPTNPNASRMAQKVGGSD

SEQ ID NO: 209882 - protein, 5 aa, Artificial Sequence
  Description of Artificial Sequence: Synthetic Linker
VGQSL

SEQ ID NO: 209883 - protein, 6 aa, Artificial Sequence
  Description of Artificial Sequence: Synthetic Linker
VSRSST

SEQ ID NO: 209884 - protein, 12 aa, Artificial Sequence
  Description of Artificial Sequence: Synthetic Linker
ERNDVAPNKPDE

SEQ ID NO: 209885 - protein, 12 aa, Artificial Sequence
  Description of Artificial Sequence: Synthetic Linker
TETAAAADPGLS

SEQ ID NO: 209886 - protein, 14 aa, Artificial Sequence
  Description of Artificial Sequence: Synthetic Linker
VAESDRPELTSARR

SEQ ID NO: 209887 - protein, 4 aa, Artificial Sequence
  Description of Artificial Sequence: Synthetic Linker
PFYP

SEQ ID NO: 209888 - protein, 6 aa, Artificial Sequence
  Description of Artificial Sequence: Synthetic Linker
GVSEKP

SEQ ID NO: 209889 - protein, 9 aa, Artificial Sequence
  Description of Artificial Sequence: Synthetic Linker
LGMGDVASL

SEQ ID NO: 209890 - protein, 15 aa, Artificial Sequence
  Description of Artificial Sequence: Synthetic Linker
ALGGEARLPVLKDRN

SEQ ID NO: 209891 - protein, 17 aa, Artificial Sequence
  Description of Artificial Sequence: Synthetic Linker
AAGLEAEAPKSAKELSL

SEQ ID NO: 209892 - protein, 4 aa, Artificial Sequence
  Description of Artificial Sequence: Synthetic Linker
KGRF

SEQ ID NO: 209893 - protein, 5 aa, Artificial Sequence
  Description of Artificial Sequence: Synthetic Linker
KAGSL

SEQ ID NO: 209894 - protein, 6 aa, Artificial Sequence
  Description of Artificial Sequence: Synthetic Linker
NTGIFI

SEQ ID NO: 209895 - protein, 6 aa, Artificial Sequence
  Description of Artificial Sequence: Synthetic Linker
QLVKSE

SEQ ID NO: 209896 - protein, 7 aa, Artificial Sequence
  Description of Artificial Sequence: Synthetic Linker
KLKYVPH

SEQ ID NO: 209897 - protein, 7 aa, Artificial Sequence
  Description of Artificial Sequence: Synthetic Linker
LGFDEVI

SEQ ID NO: 209898 - protein, 9 aa, Artificial Sequence
  Description of Artificial Sequence: Synthetic Linker
MLATNLTDK

SEQ ID NO: 209899 - protein, 16 aa, Artificial Sequence
  Description of Artificial Sequence: Synthetic Linker
LKDHILQFVIPNRGVT

SEQ ID NO: 209900 - protein, 17 aa, Artificial Sequence
  Description of Artificial Sequence: Synthetic Linker
RAKGSTKFTRVPKRVYW

SEQ ID NO: 209901 - protein, 5 aa, Artificial Sequence
  Description of Artificial Sequence: Synthetic Linker
FQKLM

SEQ ID NO: 209902 - protein, 6 aa, Artificial Sequence
  Description of Artificial Sequence: Synthetic Linker
NAPTPQ

SEQ ID NO: 209903 - protein, 8 aa, Artificial Sequence
  Description of Artificial Sequence: Synthetic Linker
EFKEGEDA

SEQ ID NO: 209904 - protein, 6 aa, Artificial Sequence
  Description of Artificial Sequence: Synthetic Linker
AGTLLP

SEQ ID NO: 209905 - protein, 6 aa, Artificial Sequence
  Description of Artificial Sequence: Synthetic Linker
LAPYKV

SEQ ID NO: 209906 - protein, 7 aa, Artificial Sequence
  Description of Artificial Sequence: Synthetic Linker
ESIKDDK

SEQ ID NO: 209907 - protein, 7 aa, Artificial Sequence
  Description of Artificial Sequence: Synthetic Linker
FHDKPEI

SEQ ID NO: 209908 - protein, 8 aa, Artificial Sequence
  Description of Artificial Sequence: Synthetic Linker
ITTPKDDE

SEQ ID NO: 209909 - protein, 9 aa, Artificial Sequence
  Description of Artificial Sequence: Synthetic Linker
HDITPSMTP

SEQ ID NO: 209910 - protein, 10 aa, Artificial Sequence
  Description of Artificial Sequence: Synthetic Linker
AEATVAPVSP

SEQ ID NO: 209911 - protein, 11 aa, Artificial Sequence
  Description of Artificial Sequence: Synthetic Linker
IDALADKYEPS

SEQ ID NO: 209912 - protein, 4 aa, Artificial Sequence
  Description of Artificial Sequence: Synthetic Linker
FYGK

SEQ ID NO: 209913 - protein, 8 aa, Artificial Sequence
  Description of Artificial Sequence: Synthetic Linker
ALSNTGEI

SEQ ID NO: 209914 - protein, 15 aa, Artificial Sequence
  Description of Artificial Sequence: Synthetic Linker
TATPPGSVTVPHPNI

SEQ ID NO: 209915 - protein, 19 aa, Artificial Sequence
  Description of Artificial Sequence: Synthetic Linker
RSPVFTDNSSPPAVPQSFQ

SEQ ID NO: 209916 - protein, 8 aa, Artificial Sequence
  Description of Artificial Sequence: Synthetic Linker
IRNIDQDV

SEQ ID NO: 209917 - protein, 8 aa, Artificial Sequence
  Description of Artificial Sequence: Synthetic Linker
REETNLMD

SEQ ID NO: 209918 - protein, 6 aa, Artificial Sequence
  Description of Artificial Sequence: Synthetic Linker
HALPLV

SEQ ID NO: 209919 - protein, 6 aa, Artificial Sequence
  Description of Artificial Sequence: Synthetic Linker
EGRSKK

SEQ ID NO: 209920 - protein, 27 aa, Artificial Sequence
  Description of Artificial Sequence: Synthetic Linker
NKEKKAVSPLLLTTTNSSEGLSMGNYI

SEQ ID NO: 209921 - protein, 7 aa, Artificial Sequence
  Description of Artificial Sequence: Synthetic Linker
DLASGQI

SEQ ID NO: 209922 - protein, 7 aa, Artificial Sequence
  Description of Artificial Sequence: Synthetic Linker
TLANGAV

SEQ ID NO: 209923 - protein, 8 aa, Artificial Sequence
  Description of Artificial Sequence: Synthetic Linker
DYDGYNQF

SEQ ID NO: 209924 - protein, 9 aa, Artificial Sequence
  Description of Artificial Sequence: Synthetic Linker
DTGGAPGTV

SEQ ID NO: 209925 - protein, 9 aa, Artificial Sequence
  Description of Artificial Sequence: Synthetic Linker
QTNGGQFPY

SEQ ID NO: 209926 - protein, 10 aa, Artificial Sequence
  Description of Artificial Sequence: Synthetic Linker
TGIKGAFRTR

SEQ ID NO: 209927 - protein, 5 aa, Artificial Sequence
  Description of Artificial Sequence: Synthetic Linker
SLPAR

SEQ ID NO: 209928 - protein, 4 aa, Artificial Sequence
  Description of Artificial Sequence: Synthetic Linker
IYPD

SEQ ID NO: 209929 - protein, 4 aa, Artificial Sequence
  Description of Artificial Sequence: Synthetic Linker
KCAV

SEQ ID NO: 209930 - protein, 4 aa, Artificial Sequence
  Description of Artificial Sequence: Synthetic Linker
MAPK

SEQ ID NO: 209931 - protein, 4 aa, Artificial Sequence
  Description of Artificial Sequence: Synthetic Linker
TESL

SEQ ID NO: 209932 - protein, 5 aa, Artificial Sequence
  Description of Artificial Sequence: Synthetic Linker
ASADQ

SEQ ID NO: 209933 - protein, 10 aa, Artificial Sequence
  Description of Artificial Sequence: Synthetic Linker
YTLRQPPPAT

SEQ ID NO: 209934 - protein, 11 aa, Artificial Sequence
  Description of Artificial Sequence: Synthetic Linker
DQSDPNDPKSR

SEQ ID NO: 209935 - protein, 24 aa, Artificial Sequence
  Description of Artificial Sequence: Synthetic Linker
SLHDMADEAGLPVQTEDGEATGTI

SEQ ID NO: 209936 - protein, 5 aa, Artificial Sequence
  Description of Artificial Sequence: Synthetic Linker
DGIEE

SEQ ID NO: 209937 - protein, 6 aa, Artificial Sequence
  Description of Artificial Sequence: Synthetic Linker
VEHLPK

SEQ ID NO: 209938 - protein, 4 aa, Artificial Sequence
  Description of Artificial Sequence: Synthetic Linker
QAHS

SEQ ID NO: 209939 - protein, 7 aa, Artificial Sequence
  Description of Artificial Sequence: Synthetic Linker
AKEAFVS

SEQ ID NO: 209940 - protein, 9 aa, Artificial Sequence
  Description of Artificial Sequence: Synthetic Linker
QGILLHRSR

SEQ ID NO: 209941 - protein, 4 aa, Artificial Sequence
  Description of Artificial Sequence: Synthetic Linker
ESEY

SEQ ID NO: 209942 - protein, 5 aa, Artificial Sequence
  Description of Artificial Sequence: Synthetic Linker
DGPTP

SEQ ID NO: 209943 - protein, 8 aa, Artificial Sequence
  Description of Artificial Sequence: Synthetic Linker
VGSEKVSK

SEQ ID NO: 209944 - protein, 4 aa, Artificial Sequence
  Description of Artificial Sequence: Synthetic Linker
IGQS

SEQ ID NO: 209945 - protein, 15 aa, Artificial Sequence
  Description of Artificial Sequence: Synthetic Linker
VSNINNTVSPSSASF

SEQ ID NO: 209946 - protein, 16 aa, Artificial Sequence
  Description of Artificial Sequence: Synthetic Linker
ALPTNARPLLPPISNP

SEQ ID NO: 209947 - protein, 8 aa, Artificial Sequence
  Description of Artificial Sequence: Synthetic Linker
VRERPVPR

SEQ ID NO: 209948 - protein, 9 aa, Artificial Sequence
  Description of Artificial Sequence: Synthetic Linker
EQADGAVRG

SEQ ID NO: 209949 - protein, 13 aa, Artificial Sequence
  Description of Artificial Sequence: Synthetic Linker
ARSGYRPDSGATP

SEQ ID NO: 209950 - protein, 8 aa, Artificial Sequence
  Description of Artificial Sequence: Synthetic Linker
PDIDKLGY

SEQ ID NO: 209951 - protein, 5 aa, Artificial Sequence
  Description of Artificial Sequence: Synthetic Linker
LGYSM

SEQ ID NO: 209952 - protein, 13 aa, Artificial Sequence
  Description of Artificial Sequence: Synthetic Linker
SGVIKKFTAIIDP

SEQ ID NO: 209953 - protein, 6 aa, Artificial Sequence
  Description of Artificial Sequence: Synthetic Linker
RTSRQL

SEQ ID NO: 209954 - protein, 4 aa, Artificial Sequence
  Description of Artificial Sequence: Synthetic Linker
SGCK

SEQ ID NO: 209955 - protein, 5 aa, Artificial Sequence
  Description of Artificial Sequence: Synthetic Linker
VSTGV

SEQ ID NO: 209956 - protein, 10 aa, Artificial Sequence
  Description of Artificial Sequence: Synthetic Linker
QALDGDITDM

SEQ ID NO: 209957 - protein, 8 aa, Artificial Sequence
  Description of Artificial Sequence: Synthetic Linker
HTAGSIPM

SEQ ID NO: 209958 - protein, 8 aa, Artificial Sequence
  Description of Artificial Sequence: Synthetic Linker
WEGHVPHY

SEQ ID NO: 209959 - protein, 9 aa, Artificial Sequence
  Description of Artificial Sequence: Synthetic Linker
VEGKREEAL

SEQ ID NO: 209960 - protein, 13 aa, Artificial Sequence
  Description of Artificial Sequence: Synthetic Linker
PMQTFSKQREVDF

SEQ ID NO: 209961 - protein, 10 aa, Artificial Sequence
  Description of Artificial Sequence: Synthetic Linker
VYFNERINVD

SEQ ID NO: 209962 - protein, 6 aa, Artificial Sequence
  Description of Artificial Sequence: Synthetic Linker
SGGPAT

SEQ ID NO: 209963 - protein, 8 aa, Artificial Sequence
  Description of Artificial Sequence: Synthetic Linker
YAATSTGR

SEQ ID NO: 209964 - protein, 9 aa, Artificial Sequence
  Description of Artificial Sequence: Synthetic Linker
TGGTEAAGG

SEQ ID NO: 209965 - protein, 6 aa, Artificial Sequence
  Description of Artificial Sequence: Synthetic Linker
FDPTEF

SEQ ID NO: 209966 - protein, 7 aa, Artificial Sequence
  Description of Artificial Sequence: Synthetic Linker
VDLDFNR

SEQ ID NO: 209967 - protein, 10 aa, Artificial Sequence
  Description of Artificial Sequence: Synthetic Linker
SNDAGFAMTS

SEQ ID NO: 209968 - protein, 11 aa, Artificial Sequence
  Description of Artificial Sequence: Synthetic Linker
NGFDPATGDLS

SEQ ID NO: 209969 - protein, 8 aa, Artificial Sequence
  Description of Artificial Sequence: Synthetic Linker
FSQPAPDR

SEQ ID NO: 209970 - protein, 5 aa, Artificial Sequence
  Description of Artificial Sequence: Synthetic Linker
CQPNE

SEQ ID NO: 209971 - protein, 5 aa, Artificial Sequence
  Description of Artificial Sequence: Synthetic Linker
KGVPC

SEQ ID NO: 209972 - protein, 5 aa, Artificial Sequence
  Description of Artificial Sequence: Synthetic Linker
PFITE

SEQ ID NO: 209973 - protein, 6 aa, Artificial Sequence
  Description of Artificial Sequence: Synthetic Linker
SIPTCE

SEQ ID NO: 209974 - protein, 6 aa, Artificial Sequence
  Description of Artificial Sequence: Synthetic Linker
VEEHNI

SEQ ID NO: 209975 - protein, 7 aa, Artificial Sequence
  Description of Artificial Sequence: Synthetic Linker
SNKEVIQ

SEQ ID NO: 209976 - protein, 7 aa, Artificial Sequence
  Description of Artificial Sequence: Synthetic Linker
TAKGDTK

SEQ ID NO: 209977 - protein, 9 aa, Artificial Sequence
  Description of Artificial Sequence: Synthetic Linker
GRWYPAFAD

SEQ ID NO: 209978 - protein, 16 aa, Artificial Sequence
  Description of Artificial Sequence: Synthetic Linker
IFYDFLHVNVIPTVSF

SEQ ID NO: 209979 - protein, 5 aa, Artificial Sequence
  Description of Artificial Sequence: Synthetic Linker
PGPAS

SEQ ID NO: 209980 - protein, 7 aa, Artificial Sequence
  Description of Artificial Sequence: Synthetic Linker
KVSKKTG

SEQ ID NO: 209981 - protein, 8 aa, Artificial Sequence
  Description of Artificial Sequence: Synthetic Linker
ACNIASMP

SEQ ID NO: 209982 - protein, 8 aa, Artificial Sequence
  Description of Artificial Sequence: Synthetic Linker
FNDEASDE

SEQ ID NO: 209983 - protein, 18 aa, Artificial Sequence
  Description of Artificial Sequence: Synthetic Linker
SLNAGELKKAAPADPSAP

SEQ ID NO: 209984 - protein, 10 aa, Artificial Sequence
  Description of Artificial Sequence: Synthetic Linker
DKYYMASPDL

SEQ ID NO: 209985 - protein, 10 aa, Artificial Sequence
  Description of Artificial Sequence: Synthetic Linker
NATNATQPIH

SEQ ID NO: 209986 - protein, 4 aa, Artificial Sequence
  Description of Artificial Sequence: Synthetic Linker
EFPP

SEQ ID NO: 209987 - protein, 9 aa, Artificial Sequence
  Description of Artificial Sequence: Synthetic Linker
ENELMYGVP

SEQ ID NO: 209988 - protein, 13 aa, Artificial Sequence
  Description of Artificial Sequence: Synthetic Linker
QSKDFLIPIGKAK

SEQ ID NO: 209989 - protein, 4 aa, Artificial Sequence
  Description of Artificial Sequence: Synthetic Linker
AGEV

SEQ ID NO: 209990 - protein, 4 aa, Artificial Sequence
  Description of Artificial Sequence: Synthetic Linker
LHPT

SEQ ID NO: 209991 - protein, 4 aa, Artificial Sequence
  Description of Artificial Sequence: Synthetic Linker
RIEA

SEQ ID NO: 209992 - protein, 4 aa, Artificial Sequence
  Description of Artificial Sequence: Synthetic Linker
SPGA

SEQ ID NO: 209993 - protein, 4 aa, Artificial Sequence
  Description of Artificial Sequence: Synthetic Linker
YFTA

SEQ ID NO: 209994 - protein, 6 aa, Artificial Sequence
  Description of Artificial Sequence: Synthetic Linker
DGSTGK

SEQ ID NO: 209995 - protein, 6 aa, Artificial Sequence
  Description of Artificial Sequence: Synthetic Linker
KGDIET

SEQ ID NO: 209996 - protein, 7 aa, Artificial Sequence
  Description of Artificial Sequence: Synthetic Linker
DEGMITE

SEQ ID NO: 209997 - protein, 7 aa, Artificial Sequence
  Description of Artificial Sequence: Synthetic Linker
QEASVSG

SEQ ID NO: 209998 - protein, 3 aa, Artificial Sequence
  Description of Artificial Sequence: Synthetic Linker
VRL

SEQ ID NO: 209999 - protein, 4 aa, Artificial Sequence
  Description of Artificial Sequence: Synthetic Linker
EAAN

SEQ ID NO: 210000 - protein, 4 aa, Artificial Sequence
  Description of Artificial Sequence: Synthetic Linker
RYGL

SEQ ID NO: 210001 - protein, 5 aa, Artificial Sequence
  Description of Artificial Sequence: Synthetic Linker
EVLDY

SEQ ID NO: 210002 - protein, 5 aa, Artificial Sequence
  Description of Artificial Sequence: Synthetic Linker
RPFVS

SEQ ID NO: 210003 - protein, 5 aa, Artificial Sequence
  Description of Artificial Sequence: Synthetic Linker
SLVNQ

SEQ ID NO: 210004 - protein, 5 aa, Artificial Sequence
  Description of Artificial Sequence: Synthetic Linker
SMGSS

SEQ ID NO: 210005 - protein, 6 aa, Artificial Sequence
  Description of Artificial Sequence: Synthetic Linker
SKEFSP

SEQ ID NO: 210006 - protein, 7 aa, Artificial Sequence
  Description of Artificial Sequence: Synthetic Linker
AAKGEKI

SEQ ID NO: 210007 - protein, 7 aa, Artificial Sequence
  Description of Artificial Sequence: Synthetic Linker
GAPDAER

SEQ ID NO: 210008 - protein, 7 aa, Artificial Sequence
  Description of Artificial Sequence: Synthetic Linker
RGEAMPK

SEQ ID NO: 210009 - protein, 8 aa, Artificial Sequence
  Description of Artificial Sequence: Synthetic Linker
SGAKKNHF

SEQ ID NO: 210010 - protein, 8 aa, Artificial Sequence
  Description of Artificial Sequence: Synthetic Linker
TGRSYKLF

SEQ ID NO: 210011 - protein, 9 aa, Artificial Sequence
  Description of Artificial Sequence: Synthetic Linker
AALPASAKV

SEQ ID NO: 210012 - protein, 9 aa, Artificial Sequence
  Description of Artificial Sequence: Synthetic Linker
DGFRTSHEI

SEQ ID NO: 210013 - protein, 10 aa, Artificial Sequence
  Description of Artificial Sequence: Synthetic Linker
KSMNPEHPHV

SEQ ID NO: 210014 - protein, 10 aa, Artificial Sequence
  Description of Artificial Sequence: Synthetic Linker
RGTAQNPDIY

SEQ ID NO: 210015 - protein, 11 aa, Artificial Sequence
  Description of Artificial Sequence: Synthetic Linker
WVPENCIQCNQ

SEQ ID NO: 210016 - protein, 12 aa, Artificial Sequence
  Description of Artificial Sequence: Synthetic Linker
DRTKEPGAPGDP

SEQ ID NO: 210017 - protein, 28 aa, Artificial Sequence
  Description of Artificial Sequence: Synthetic Linker
TVGIEDDVTGTSLPVDNAFADTTPKGTI

SEQ ID NO: 210018 - protein, 4 aa, Artificial Sequence
  Description of Artificial Sequence: Synthetic Linker
AGED

SEQ ID NO: 210019 - protein, 4 aa, Artificial Sequence
  Description of Artificial Sequence: Synthetic Linker
DADS

SEQ ID NO: 210020 - protein, 4 aa, Artificial Sequence
  Description of Artificial Sequence: Synthetic Linker
DGTV

SEQ ID NO: 210021 - protein, 4 aa, Artificial Sequence
  Description of Artificial Sequence: Synthetic Linker
QDGR

SEQ ID NO: 210022 - protein, 5 aa, Artificial Sequence
  Description of Artificial Sequence: Synthetic Linker
LGAGE

SEQ ID NO: 210023 - protein, 5 aa, Artificial Sequence
  Description of Artificial Sequence: Synthetic Linker
QPGRG

SEQ ID NO: 210024 - protein, 6 aa, Artificial Sequence
  Description of Artificial Sequence: Synthetic Linker
DFADGS

SEQ ID NO: 210025 - protein, 6 aa, Artificial Sequence
  Description of Artificial Sequence: Synthetic Linker
YDRPDR

SEQ ID NO: 210026 - protein, 7 aa, Artificial Sequence
  Description of Artificial Sequence: Synthetic Linker
KADAAPQ

SEQ ID NO: 210027 - protein, 15 aa, Artificial Sequence
  Description of Artificial Sequence: Synthetic Linker
PLGEAPDAYADDASG

SEQ ID NO: 210028 - protein, 4 aa, Artificial Sequence
  Description of Artificial Sequence: Synthetic Linker
PCFP

SEQ ID NO: 210029 - protein, 7 aa, Artificial Sequence
  Description of Artificial Sequence: Synthetic Linker
DLESPVK

SEQ ID NO: 210030 - protein, 7 aa, Artificial Sequence
  Description of Artificial Sequence: Synthetic Linker
FLRIQNV

SEQ ID NO: 210031 - protein, 10 aa, Artificial Sequence
  Description of Artificial Sequence: Synthetic Linker
LGHPCTRTPH

SEQ ID NO: 210032 - protein, 6 aa, Artificial Sequence
  Description of Artificial Sequence: Synthetic Linker
HFPKTF

SEQ ID NO: 210033 - protein, 7 aa, Artificial Sequence
  Description of Artificial Sequence: Synthetic Linker
RKLLGVK

SEQ ID NO: 210034 - protein, 7 aa, Artificial Sequence
  Description of Artificial Sequence: Synthetic Linker
SATPIPR

SEQ ID NO: 210035 - protein, 8 aa, Artificial Sequence
  Description of Artificial Sequence: Synthetic Linker
FYGDLDVT

SEQ ID NO: 210036 - protein, 8 aa, Artificial Sequence
  Description of Artificial Sequence: Synthetic Linker
SLPFKLTN

SEQ ID NO: 210037 - protein, 9 aa, Artificial Sequence
  Description of Artificial Sequence: Synthetic Linker
CSLKETLPE

SEQ ID NO: 210038 - protein, 9 aa, Artificial Sequence
  Description of Artificial Sequence: Synthetic Linker
ISEKPMNRL

SEQ ID NO: 210039 - protein, 9 aa, Artificial Sequence
  Description of Artificial Sequence: Synthetic Linker
TMLVPMDRV

SEQ ID NO: 210040 - protein, 10 aa, Artificial Sequence
  Description of Artificial Sequence: Synthetic Linker
IYRLTSGISQ

SEQ ID NO: 210041 - protein, 11 aa, Artificial Sequence
  Description of Artificial Sequence: Synthetic Linker
HGGIPKKIEGK

SEQ ID NO: 210042 - protein, 12 aa, Artificial Sequence
  Description of Artificial Sequence: Synthetic Linker
IDEMPPGRKEVQ

SEQ ID NO: 210043 - protein, 12 aa, Artificial Sequence
  Description of Artificial Sequence: Synthetic Linker
TPKEGEYVRRIL

SEQ ID NO: 210044 - protein, 9 aa, Artificial Sequence
  Description of Artificial Sequence: Synthetic Linker
KSDYTQNNI

SEQ ID NO: 210045 - protein, 15 aa, Artificial Sequence
  Description of Artificial Sequence: Synthetic Linker
EGMGPVLAPVTPVPV

SEQ ID NO: 210046 - protein, 7 aa, Artificial Sequence
  Description of Artificial Sequence: Synthetic Linker
MLNQNWH

SEQ ID NO: 210047 - protein, 10 aa, Artificial Sequence
  Description of Artificial Sequence: Synthetic Linker
NMTNATDASP

SEQ ID NO: 210048 - protein, 14 aa, Artificial Sequence
  Description of Artificial Sequence: Synthetic Linker
LLYDERTTNLTLDE

SEQ ID NO: 210049 - protein, 6 aa, Artificial Sequence
  Description of Artificial Sequence: Synthetic Linker
EAGYPG

SEQ ID NO: 210050 - protein, 7 aa, Artificial Sequence
  Description of Artificial Sequence: Synthetic Linker
LFDSLSP

SEQ ID NO: 210051 - protein, 7 aa, Artificial Sequence
  Description of Artificial Sequence: Synthetic Linker
TREGKST

SEQ ID NO: 210052 - protein, 5 aa, Artificial Sequence
  Description of Artificial Sequence: Synthetic Linker
AEGDM

SEQ ID NO: 210053 - protein, 6 aa, Artificial Sequence
  Description of Artificial Sequence: Synthetic Linker
AALDKK

SEQ ID NO: 210054 - protein, 6 aa, Artificial Sequence
  Description of Artificial Sequence: Synthetic Linker
ENEGLE

SEQ ID NO: 210055 - protein, 7 aa, Artificial Sequence
  Description of Artificial Sequence: Synthetic Linker
RFRPLRD

SEQ ID NO: 210056 - protein, 7 aa, Artificial Sequence
  Description of Artificial Sequence: Synthetic Linker
VASRARP

SEQ ID NO: 210057 - protein, 4 aa, Artificial Sequence
  Description of Artificial Sequence: Synthetic Linker
TKNI

SEQ ID NO: 210058 - protein, 6 aa, Artificial Sequence
  Description of Artificial Sequence: Synthetic Linker
VSAGST

SEQ ID NO: 210059 - protein, 9 aa, Artificial Sequence
  Description of Artificial Sequence: Synthetic Linker
SGSVKTGTT

SEQ ID NO: 210060 - protein, 10 aa, Artificial Sequence
  Description of Artificial Sequence: Synthetic Linker
DLDIKGYVAA

SEQ ID NO: 210061 - protein, 13 aa, Artificial Sequence
  Description of Artificial Sequence: Synthetic Linker
SRSGTPSTSIDTS

SEQ ID NO: 210062 - protein, 9 aa, Artificial Sequence
  Description of Artificial Sequence: Synthetic Linker
CDGDEYKPV

SEQ ID NO: 210063 - protein, 14 aa, Artificial Sequence
  Description of Artificial Sequence: Synthetic Linker
DGPCEPDEDEDVCQ

SEQ ID NO: 210064 - protein, 14 aa, Artificial Sequence
  Description of Artificial Sequence: Synthetic Linker
RAVLSSTRMGGHFV

SEQ ID NO: 210065 - protein, 4 aa, Artificial Sequence
  Description of Artificial Sequence: Synthetic Linker
QLRT

SEQ ID NO: 210066 - protein, 5 aa, Artificial Sequence
  Description of Artificial Sequence: Synthetic Linker
DITNA

SEQ ID NO: 210067 - protein, 6 aa, Artificial Sequence
  Description of Artificial Sequence: Synthetic Linker
QEVVAP

SEQ ID NO: 210068 - protein, 4 aa, Artificial Sequence
  Description of Artificial Sequence: Synthetic Linker
ILGE

SEQ ID NO: 210069 - protein, 5 aa, Artificial Sequence
  Description of Artificial Sequence: Synthetic Linker
SQGGK

SEQ ID NO: 210070 - protein, 6 aa, Artificial Sequence
  Description of Artificial Sequence: Synthetic Linker
IARPPA

SEQ ID NO: 210071 - protein, 7 aa, Artificial Sequence
  Description of Artificial Sequence: Synthetic Linker
PTFAVER

SEQ ID NO: 210072 - protein, 12 aa, Artificial Sequence
  Description of Artificial Sequence: Synthetic Linker
EGTYGDRPHRPY

SEQ ID NO: 210073 - protein, 24 aa, Artificial Sequence
  Description of Artificial Sequence: Synthetic Linker
YSGDLGNREKDVLPDPSLPPLADL

SEQ ID NO: 210074 - protein, 4 aa, Artificial Sequence
  Description of Artificial Sequence: Synthetic Linker
DYTE

SEQ ID NO: 210075 - protein, 4 aa, Artificial Sequence
  Description of Artificial Sequence: Synthetic Linker
TFSY

SEQ ID NO: 210076 - protein, 6 aa, Artificial Sequence
  Description of Artificial Sequence: Synthetic Linker
DTFIDH

SEQ ID NO: 210077 - protein, 8 aa, Artificial Sequence
  Description of Artificial Sequence: Synthetic Linker
EMGKYDNH

SEQ ID NO: 210078 - protein, 9 aa, Artificial Sequence
  Description of Artificial Sequence: Synthetic Linker
YGQFEPPAL

SEQ ID NO: 210079 - protein, 16 aa, Artificial Sequence
  Description of Artificial Sequence: Synthetic Linker
KYLVQNRVTGEIYESA

SEQ ID NO: 210080 - protein, 13 aa, Artificial Sequence
  Description of Artificial Sequence: Synthetic Linker
DLSVFPELEEGDY

SEQ ID NO: 210081 - protein, 9 aa, Artificial Sequence
  Description of Artificial Sequence: Synthetic Linker
DYGFIEPNE

SEQ ID NO: 210082 - protein, 6 aa, Artificial Sequence
  Description of Artificial Sequence: Synthetic Linker
KSGEDI

SEQ ID NO: 210083 - protein, 29 aa, Artificial Sequence
  Description of Artificial Sequence: Synthetic Linker
INQGEDSVPAKKFKAAPAEISDGEDRSKC

SEQ ID NO: 210084 - protein, 5 aa, Artificial Sequence
  Description of Artificial Sequence: Synthetic Linker
RSPEW

SEQ ID NO: 210085 - protein, 19 aa, Artificial Sequence
  Description of Artificial Sequence: Synthetic Linker
SAFGIRPPLRLGEFTMPEH

SEQ ID NO: 210086 - protein, 12 aa, Artificial Sequence
  Description of Artificial Sequence: Synthetic Linker
LNTGASDNFTRW

SEQ ID NO: 210087 - protein, 12 aa, Artificial Sequence
  Description of Artificial Sequence: Synthetic Linker
AEKGEDIEIKKV

SEQ ID NO: 210088 - protein, 15 aa, Artificial Sequence
  Description of Artificial Sequence: Synthetic Linker
VDRADPLEQGAGDQG

SEQ ID NO: 210089 - protein, 4 aa, Artificial Sequence
  Description of Artificial Sequence: Synthetic Linker
DGDF

SEQ ID NO: 210090 - protein, 4 aa, Artificial Sequence
  Description of Artificial Sequence: Synthetic Linker
KNDK

SEQ ID NO: 210091 - protein, 4 aa, Artificial Sequence
  Description of Artificial Sequence: Synthetic Linker
PIRS

SEQ ID NO: 210092 - protein, 4 aa, Artificial Sequence
  Description of Artificial Sequence: Synthetic Linker
PMTG

SEQ ID NO: 210093 - protein, 4 aa, Artificial Sequence
  Description of Artificial Sequence: Synthetic Linker
RACC

SEQ ID NO: 210094 - protein, 4 aa, Artificial Sequence
  Description of Artificial Sequence: Synthetic Linker
VGTT

SEQ ID NO: 210095 - protein, 5 aa, Artificial Sequence
  Description of Artificial Sequence: Synthetic Linker
DAGIR

SEQ ID NO: 210096 - protein, 5 aa, Artificial Sequence
  Description of Artificial Sequence: Synthetic Linker
DDLPL

SEQ ID NO: 210097 - protein, 5 aa, Artificial Sequence
  Description of Artificial Sequence: Synthetic Linker
GCTSV

SEQ ID NO: 210098 - protein, 5 aa, Artificial Sequence
  Description of Artificial Sequence: Synthetic Linker
ITAFV

SEQ ID NO: 210099 - protein, 5 aa, Artificial Sequence
  Description of Artificial Sequence: Synthetic Linker
TASEM

SEQ ID NO: 210100 - protein, 5 aa, Artificial Sequence
  Description of Artificial Sequence: Synthetic Linker
TGDNK

SEQ ID NO: 210101 - protein, 5 aa, Artificial Sequence
  Description of Artificial Sequence: Synthetic Linker
YETDL

SEQ ID NO: 210102 - protein, 6 aa, Artificial Sequence
  Description of Artificial Sequence: Synthetic Linker
LADDNF

SEQ ID NO: 210103 - protein, 6 aa, Artificial Sequence
  Description of Artificial Sequence: Synthetic Linker
MGSGTA

SEQ ID NO: 210104 - protein, 7 aa, Artificial Sequence
  Description of Artificial Sequence: Synthetic Linker
ARVEPSH

SEQ ID NO: 210105 - protein, 7 aa, Artificial Sequence
  Description of Artificial Sequence: Synthetic Linker
EMVLDDS

SEQ ID NO: 210106 - protein, 7 aa, Artificial Sequence
  Description of Artificial Sequence: Synthetic Linker
RDTPPKR

SEQ ID NO: 210107 - protein, 7 aa, Artificial Sequence
  Description of Artificial Sequence: Synthetic Linker
TGRDTLR

SEQ ID NO: 210108 - protein, 8 aa, Artificial Sequence
  Description of Artificial Sequence: Synthetic Linker
LDPPRKEV

SEQ ID NO: 210109 - protein, 9 aa, Artificial Sequence
  Description of Artificial Sequence: Synthetic Linker
LAWFEEGEE

SEQ ID NO: 210110 - protein, 10 aa, Artificial Sequence
  Description of Artificial Sequence: Synthetic Linker
ALGLPEALIP

SEQ ID NO: 210111 - protein, 12 aa, Artificial Sequence
  Description of Artificial Sequence: Synthetic Linker
DKTGTLTTNQMS

SEQ ID NO: 210112 - protein, 12 aa, Artificial Sequence
  Description of Artificial Sequence: Synthetic Linker
ITGSTYAPEGEV

SEQ ID NO: 210113 - protein, 14 aa, Artificial Sequence
  Description of Artificial Sequence: Synthetic Linker
IGIFGENEEVADRA

SEQ ID NO: 210114 - protein, 6 aa, Artificial Sequence
  Description of Artificial Sequence: Synthetic Linker
YLRQDL

SEQ ID NO: 210115 - protein, 8 aa, Artificial Sequence
  Description of Artificial Sequence: Synthetic Linker
ESQSLSIQ

SEQ ID NO: 210116 - protein, 6 aa, Artificial Sequence
  Description of Artificial Sequence: Synthetic Linker
SGKQSY

SEQ ID NO: 210117 - protein, 14 aa, Artificial Sequence
  Description of Artificial Sequence: Synthetic Linker
FRARGKAVSTVFDQ

SEQ ID NO: 210118 - protein, 6 aa, Artificial Sequence
  Description of Artificial Sequence: Synthetic Linker
DANSEM

SEQ ID NO: 210119 - protein, 7 aa, Artificial Sequence
  Description of Artificial Sequence: Synthetic Linker
DITAQKE

SEQ ID NO: 210120 - protein, 8 aa, Artificial Sequence
  Description of Artificial Sequence: Synthetic Linker
TVESTGKV

SEQ ID NO: 210121 - protein, 5 aa, Artificial Sequence
  Description of Artificial Sequence: Synthetic Linker
AQDRK

SEQ ID NO: 210122 - protein, 8 aa, Artificial Sequence
  Description of Artificial Sequence: Synthetic Linker
ALSSTGEI

SEQ ID NO: 210123 - protein, 17 aa, Artificial Sequence
  Description of Artificial Sequence: Synthetic Linker
LLQVPLPPWPGAPVGGE

SEQ ID NO: 210124 - protein, 6 aa, Artificial Sequence
  Description of Artificial Sequence: Synthetic Linker
FRGPDR

SEQ ID NO: 210125 - protein, 4 aa, Artificial Sequence
  Description of Artificial Sequence: Synthetic Linker
EGGK

SEQ ID NO: 210126 - protein, 6 aa, Artificial Sequence
  Description of Artificial Sequence: Synthetic Linker
INDKYE

SEQ ID NO: 210127 - protein, 6 aa, Artificial Sequence
  Description of Artificial Sequence: Synthetic Linker
NETTNK

SEQ ID NO: 210128 - protein, 8 aa, Artificial Sequence
  Description of Artificial Sequence: Synthetic Linker
DFDSGSLR

SEQ ID NO: 210129 - protein, 11 aa, Artificial Sequence
  Description of Artificial Sequence: Synthetic Linker
PMNVFYKDSLF

SEQ ID NO: 210130 - protein, 9 aa, Artificial Sequence
  Description of Artificial Sequence: Synthetic Linker
KNGDNDFRY

SEQ ID NO: 210131 - protein, 4 aa, Artificial Sequence
  Description of Artificial Sequence: Synthetic Linker
GGEA

SEQ ID NO: 210132 - protein, 4 aa, Artificial Sequence
  Description of Artificial Sequence: Synthetic Linker
LGDV

SEQ ID NO: 210133 - protein, 5 aa, Artificial Sequence
  Description of Artificial Sequence: Synthetic Linker
YSNVE

SEQ ID NO: 210134 - protein, 6 aa, Artificial Sequence
  Description of Artificial Sequence: Synthetic Linker
DPVSKE

SEQ ID NO: 210135 - protein, 6 aa, Artificial Sequence
  Description of Artificial Sequence: Synthetic Linker
GLPGDK

SEQ ID NO: 210136 - protein, 6 aa, Artificial Sequence
  Description of Artificial Sequence: Synthetic Linker
IVPPGQ

SEQ ID NO: 210137 - protein, 9 aa, Artificial Sequence
  Description of Artificial Sequence: Synthetic Linker
TVPIAQDQV

SEQ ID NO: 210138 - protein, 11 aa, Artificial Sequence
  Description of Artificial Sequence: Synthetic Linker
EVPKNETKENG

SEQ ID NO: 210139 - protein, 12 aa, Artificial Sequence
  Description of Artificial Sequence: Synthetic Linker
MYYQQPGQQLAT

SEQ ID NO: 210140 - protein, 16 aa, Artificial Sequence
  Description of Artificial Sequence: Synthetic Linker
QPGCSSGQACENALPV

SEQ ID NO: 210141 - protein, 8 aa, Artificial Sequence
  Description of Artificial Sequence: Synthetic Linker
KYTYEHDP

SEQ ID NO: 210142 - protein, 10 aa, Artificial Sequence
  Description of Artificial Sequence: Synthetic Linker
IGGPPNACLD

SEQ ID NO: 210143 - protein, 20 aa, Artificial Sequence
  Description of Artificial Sequence: Synthetic Linker
ENAQRFNQAQSGNIQSTVML

SEQ ID NO: 210144 - protein, 25 aa, Artificial Sequence
  Description of Artificial Sequence: Synthetic Linker
LQNREHETNGVAKSDQKQEQLLLKK

SEQ ID NO: 210145 - protein, 9 aa, Artificial Sequence
  Description of Artificial Sequence: Synthetic Linker
CEMGSTFQL

SEQ ID NO: 210146 - protein, 26 aa, Artificial Sequence
  Description of Artificial Sequence: Synthetic Linker
PDGRNQNPDLTGLCEPTPQDHIKVTQ

SEQ ID NO: 210147 - protein, 4 aa, Artificial Sequence
  Description of Artificial Sequence: Synthetic Linker
NHPA

SEQ ID NO: 210148 - protein, 5 aa, Artificial Sequence
  Description of Artificial Sequence: Synthetic Linker
CNLTP

SEQ ID NO: 210149 - protein, 5 aa, Artificial Sequence
  Description of Artificial Sequence: Synthetic Linker
IRRTS

SEQ ID NO: 210150 - protein, 6 aa, Artificial Sequence
  Description of Artificial Sequence: Synthetic Linker
KYLPVK

SEQ ID NO: 210151 - protein, 7 aa, Artificial Sequence
  Description of Artificial Sequence: Synthetic Linker
ISGTPIQ

SEQ ID NO: 210152 - protein, 8 aa, Artificial Sequence
  Description of Artificial Sequence: Synthetic Linker
RDADASDK

SEQ ID NO: 210153 - protein, 9 aa, Artificial Sequence
  Description of Artificial Sequence: Synthetic Linker
TGEEGFDGA

SEQ ID NO: 210154 - protein, 10 aa, Artificial Sequence
  Description of Artificial Sequence: Synthetic Linker
ESLQTGKISV

SEQ ID NO: 210155 - protein, 14 aa, Artificial Sequence
  Description of Artificial Sequence: Synthetic Linker
DLFPQNYSTKAVEP

SEQ ID NO: 210156 - protein, 4 aa, Artificial Sequence
  Description of Artificial Sequence: Synthetic Linker
SATH

SEQ ID NO: 210157 - protein, 7 aa, Artificial Sequence
  Description of Artificial Sequence: Synthetic Linker
YIPLPEP

SEQ ID NO: 210158 - protein, 8 aa, Artificial Sequence
  Description of Artificial Sequence: Synthetic Linker
RKTDGYSG

SEQ ID NO: 210159 - protein, 9 aa, Artificial Sequence
  Description of Artificial Sequence: Synthetic Linker
PSRADPNHL

SEQ ID NO: 210160 - protein, 10 aa, Artificial Sequence
  Description of Artificial Sequence: Synthetic Linker
LGTTQNSLTE

SEQ ID NO: 210161 - protein, 9 aa, Artificial Sequence
  Description of Artificial Sequence: Synthetic Linker
NLLGQQPLV

SEQ ID NO: 210162 - protein, 10 aa, Artificial Sequence
  Description of Artificial Sequence: Synthetic Linker
SSYGPASGPL

SEQ ID NO: 210163 - protein, 11 aa, Artificial Sequence
  Description of Artificial Sequence: Synthetic Linker
VAQLPKKQVYI

SEQ ID NO: 210164 - protein, 16 aa, Artificial Sequence
  Description of Artificial Sequence: Synthetic Linker
SATPQGQTAKIEVPHT

SEQ ID NO: 210165 - protein, 4 aa, Artificial Sequence
  Description of Artificial Sequence: Synthetic Linker
FSCS

SEQ ID NO: 210166 - protein, 8 aa, Artificial Sequence
  Description of Artificial Sequence: Synthetic Linker
FWLAIDMS

SEQ ID NO: 210167 - protein, 9 aa, Artificial Sequence
  Description of Artificial Sequence: Synthetic Linker
VKAAPQAPV

SEQ ID NO: 210168 - protein, 13 aa, Artificial Sequence
  Description of Artificial Sequence: Synthetic Linker
ADQSESQMIPKDS

SEQ ID NO: 210169 - protein, 4 aa, Artificial Sequence
  Description of Artificial Sequence: Synthetic Linker
FAFI

SEQ ID NO: 210170 - protein, 4 aa, Artificial Sequence
  Description of Artificial Sequence: Synthetic Linker
IQNT

SEQ ID NO: 210171 - protein, 5 aa, Artificial Sequence
  Description of Artificial Sequence: Synthetic Linker
GTLSP

SEQ ID NO: 210172 - protein, 6 aa, Artificial Sequence
  Description of Artificial Sequence: Synthetic Linker
QVPQDD

SEQ ID NO: 210173 - protein, 8 aa, Artificial Sequence
  Description of Artificial Sequence: Synthetic Linker
HLSAGCPH

SEQ ID NO: 210174 - protein, 11 aa, Artificial Sequence
  Description of Artificial Sequence: Synthetic Linker
FSTRVLPAQAT

SEQ ID NO: 210175 - protein, 4 aa, Artificial Sequence
  Description of Artificial Sequence: Synthetic Linker
EMDS

SEQ ID NO: 210176 - protein, 5 aa, Artificial Sequence
  Description of Artificial Sequence: Synthetic Linker
HFPLK

SEQ ID NO: 210177 - protein, 6 aa, Artificial Sequence
  Description of Artificial Sequence: Synthetic Linker
DLDNVT

SEQ ID NO: 210178 - protein, 6 aa, Artificial Sequence
  Description of Artificial Sequence: Synthetic Linker
FDGQLE

SEQ ID NO: 210179 - protein, 7 aa, Artificial Sequence
  Description of Artificial Sequence: Synthetic Linker
ITNECQW

SEQ ID NO: 210180 - protein, 7 aa, Artificial Sequence
  Description of Artificial Sequence: Synthetic Linker
SQPFPVV

SEQ ID NO: 210181 - protein, 7 aa, Artificial Sequence
  Description of Artificial Sequence: Synthetic Linker
TGARSNF

SEQ ID NO: 210182 - protein, 8 aa, Artificial Sequence
  Description of Artificial Sequence: Synthetic Linker
ESDASNPF

SEQ ID NO: 210183 - protein, 8 aa, Artificial Sequence
  Description of Artificial Sequence: Synthetic Linker
HFFGNRSI

SEQ ID NO: 210184 - protein, 9 aa, Artificial Sequence
  Description of Artificial Sequence: Synthetic Linker
QPIYPATLT

SEQ ID NO: 210185 - protein, 10 aa, Artificial Sequence
  Description of Artificial Sequence: Synthetic Linker
FLAGTRKCSV

SEQ ID NO: 210186 - protein, 12 aa, Artificial Sequence
  Description of Artificial Sequence: Synthetic Linker
LNPQHSAPKPNV

SEQ ID NO: 210187 - protein, 12 aa, Artificial Sequence
  Description of Artificial Sequence: Synthetic Linker
SKGKQLGENQLV

SEQ ID NO: 210188 - protein, 15 aa, Artificial Sequence
  Description of Artificial Sequence: Synthetic Linker
ATKQDPVRPKRPLSS

SEQ ID NO: 210189 - protein, 16 aa, Artificial Sequence
  Description of Artificial Sequence: Synthetic Linker
ICDSHPTNKNNPTTPL

SEQ ID NO: 210190 - protein, 9 aa, Artificial Sequence
  Description of Artificial Sequence: Synthetic Linker
YLDTKPAPV

SEQ ID NO: 210191 - protein, 4 aa, Artificial Sequence
  Description of Artificial Sequence: Synthetic Linker
IHKK

SEQ ID NO: 210192 - protein, 5 aa, Artificial Sequence
  Description of Artificial Sequence: Synthetic Linker
GIMPG

SEQ ID NO: 210193 - protein, 5 aa, Artificial Sequence
  Description of Artificial Sequence: Synthetic Linker
NPGEC

SEQ ID NO: 210194 - protein, 7 aa, Artificial Sequence
  Description of Artificial Sequence: Synthetic Linker
IGPNCPG

SEQ ID NO: 210195 - protein, 8 aa, Artificial Sequence
  Description of Artificial Sequence: Synthetic Linker
CITEGIPQ

SEQ ID NO: 210196 - protein, 8 aa, Artificial Sequence
  Description of Artificial Sequence: Synthetic Linker
LLRQGKTR

SEQ ID NO: 210197 - protein, 4 aa, Artificial Sequence
  Description of Artificial Sequence: Synthetic Linker
MRDQ

SEQ ID NO: 210198 - protein, 4 aa, Artificial Sequence
  Description of Artificial Sequence: Synthetic Linker
QEDP

SEQ ID NO: 210199 - protein, 5 aa, Artificial Sequence
  Description of Artificial Sequence: Synthetic Linker
CLDGK

SEQ ID NO: 210200 - protein, 5 aa, Artificial Sequence
  Description of Artificial Sequence: Synthetic Linker
QWELN

SEQ ID NO: 210201 - protein, 6 aa, Artificial Sequence
  Description of Artificial Sequence: Synthetic Linker
ALDGNI

SEQ ID NO: 210202 - protein, 6 aa, Artificial Sequence
  Description of Artificial Sequence: Synthetic Linker
TKQGDL

SEQ ID NO: 210203 - protein, 31 aa, Artificial Sequence
  Description of Artificial Sequence: Synthetic Linker
KGEKYEKRIERLSVRKEEDVKTRSGKLGDNV

SEQ ID NO: 210204 - protein, 27 aa, Artificial Sequence
  Description of Artificial Sequence: Synthetic Linker
AEDRPLSRELPAPAGGPVALSLHDEPT

SEQ ID NO: 210205 - protein, 9 aa, Artificial Sequence
  Description of Artificial Sequence: Synthetic Linker
PYQKTSIPK

SEQ ID NO: 210206 - protein, 9 aa, Artificial Sequence
  Description of Artificial Sequence: Synthetic Linker
RGAGKPNSS

SEQ ID NO: 210207 - protein, 6 aa, Artificial Sequence
  Description of Artificial Sequence: Synthetic Linker
AVGKNP

SEQ ID NO: 210208 - protein, 6 aa, Artificial Sequence
  Description of Artificial Sequence: Synthetic Linker
DTATNT

SEQ ID NO: 210209 - protein, 6 aa, Artificial Sequence
  Description of Artificial Sequence: Synthetic Linker
FLSEPV

SEQ ID NO: 210210 - protein, 6 aa, Artificial Sequence
  Description of Artificial Sequence: Synthetic Linker
LSFCNT

SEQ ID NO: 210211 - protein, 7 aa, Artificial Sequence
  Description of Artificial Sequence: Synthetic Linker
SNITSGY

SEQ ID NO: 210212 - protein, 7 aa, Artificial Sequence
  Description of Artificial Sequence: Synthetic Linker
VTPDGKK

SEQ ID NO: 210213 - protein, 7 aa, Artificial Sequence
  Description of Artificial Sequence: Synthetic Linker
YASGQFI

SEQ ID NO: 210214 - protein, 13 aa, Artificial Sequence
  Description of Artificial Sequence: Synthetic Linker
SIPVQPVYPSADF

SEQ ID NO: 210215 - protein, 7 aa, Artificial Sequence
  Description of Artificial Sequence: Synthetic Linker
EIPTSNI

SEQ ID NO: 210216 - protein, 8 aa, Artificial Sequence
  Description of Artificial Sequence: Synthetic Linker
KADFPTPS

SEQ ID NO: 210217 - protein, 10 aa, Artificial Sequence
  Description of Artificial Sequence: Synthetic Linker
HPYIQNPDPA

SEQ ID NO: 210218 - protein, 11 aa, Artificial Sequence
  Description of Artificial Sequence: Synthetic Linker
DTPPNFLDDDM

SEQ ID NO: 210219 - protein, 7 aa, Artificial Sequence
  Description of Artificial Sequence: Synthetic Linker
FCKALNP

SEQ ID NO: 210220 - protein, 13 aa, Artificial Sequence
  Description of Artificial Sequence: Synthetic Linker
HHDYSLPAAGESW

SEQ ID NO: 210221 - protein, 4 aa, Artificial Sequence
  Description of Artificial Sequence: Synthetic Linker
AEGV

SEQ ID NO: 210222 - protein, 7 aa, Artificial Sequence
  Description of Artificial Sequence: Synthetic Linker
LMLIADV

SEQ ID NO: 210223 - protein, 8 aa, Artificial Sequence
  Description of Artificial Sequence: Synthetic Linker
EAGEEGEK

SEQ ID NO: 210224 - protein, 22 aa, Artificial Sequence
  Description of Artificial Sequence: Synthetic Linker
RSTPPPEMPKPVPRKEVQAGVE

SEQ ID NO: 210225 - protein, 6 aa, Artificial Sequence
  Description of Artificial Sequence: Synthetic Linker
CVPLVR

SEQ ID NO: 210226 - protein, 6 aa, Artificial Sequence
  Description of Artificial Sequence: Synthetic Linker
KSDPIQ

SEQ ID NO: 210227 - protein, 4 aa, Artificial Sequence
  Description of Artificial Sequence: Synthetic Linker
AGVE

SEQ ID NO: 210228 - protein, 12 aa, Artificial Sequence
  Description of Artificial Sequence: Synthetic Linker
NAGGELFRDVNV

SEQ ID NO: 210229 - protein, 17 aa, Artificial Sequence
  Description of Artificial Sequence: Synthetic Linker
ERGAWSAPLPRQPRADT

SEQ ID NO: 210230 - protein, 19 aa, Artificial Sequence
  Description of Artificial Sequence: Synthetic Linker
LAGQQLEHGQTRRFGAISQ

SEQ ID NO: 210231 - protein, 4 aa, Artificial Sequence
  Description of Artificial Sequence: Synthetic Linker
IDNG

SEQ ID NO: 210232 - protein, 4 aa, Artificial Sequence
  Description of Artificial Sequence: Synthetic Linker
KVSW

SEQ ID NO: 210233 - protein, 5 aa, Artificial Sequence
  Description of Artificial Sequence: Synthetic Linker
NRGES

SEQ ID NO: 210234 - protein, 6 aa, Artificial Sequence
  Description of Artificial Sequence: Synthetic Linker
ITAKDE

SEQ ID NO: 210235 - protein, 6 aa, Artificial Sequence
  Description of Artificial Sequence: Synthetic Linker
LWPHTK

SEQ ID NO: 210236 - protein, 6 aa, Artificial Sequence
  Description of Artificial Sequence: Synthetic Linker
MAIGPV

SEQ ID NO: 210237 - protein, 8 aa, Artificial Sequence
  Description of Artificial Sequence: Synthetic Linker
AEKNYDVI

SEQ ID NO: 210238 - protein, 8 aa, Artificial Sequence
  Description of Artificial Sequence: Synthetic Linker
DLDRTLTQ

SEQ ID NO: 210239 - protein, 9 aa, Artificial Sequence
  Description of Artificial Sequence: Synthetic Linker
NIAHDDKPG

SEQ ID NO: 210240 - protein, 4 aa, Artificial Sequence
  Description of Artificial Sequence: Synthetic Linker
FFDK

SEQ ID NO: 210241 - protein, 6 aa, Artificial Sequence
  Description of Artificial Sequence: Synthetic Linker
LFSNDE

SEQ ID NO: 210242 - protein, 6 aa, Artificial Sequence
  Description of Artificial Sequence: Synthetic Linker
VTPGSE

SEQ ID NO: 210243 - protein, 7 aa, Artificial Sequence
  Description of Artificial Sequence: Synthetic Linker
ERKERDH

SEQ ID NO: 210244 - protein, 12 aa, Artificial Sequence
  Description of Artificial Sequence: Synthetic Linker
FDIDQNISSDDF

SEQ ID NO: 210245 - protein, 17 aa, Artificial Sequence
  Description of Artificial Sequence: Synthetic Linker
ELIDAIPEDENVTLYSQ

SEQ ID NO: 210246 - protein, 19 aa, Artificial Sequence
  Description of Artificial Sequence: Synthetic Linker
TMKQIVNENMKIERKVVSR

SEQ ID NO: 210247 - protein, 23 aa, Artificial Sequence
  Description of Artificial Sequence: Synthetic Linker
AHAIKRLYGNVKFGVGPVIEGGF

SEQ ID NO: 210248 - protein, 21 aa, Artificial Sequence
  Description of Artificial Sequence: Synthetic Linker
INGGWGPWSPWDICSVTCGGG

SEQ ID NO: 210249 - protein, 16 aa, Artificial Sequence
  Description of Artificial Sequence: Synthetic Linker
LKMKGLTYTMCDKTKF

SEQ ID NO: 210250 - protein, 7 aa, Artificial Sequence
  Description of Artificial Sequence: Synthetic Linker
LRGEVVS

SEQ ID NO: 210251 - protein, 10 aa, Artificial Sequence
  Description of Artificial Sequence: Synthetic Linker
IHLPKTLEGM

SEQ ID NO: 210252 - protein, 4 aa, Artificial Sequence
  Description of Artificial Sequence: Synthetic Linker
PYPV

SEQ ID NO: 210253 - protein, 14 aa, Artificial Sequence
  Description of Artificial Sequence: Synthetic Linker
LNKEGEPTKQRTRD

SEQ ID NO: 210254 - protein, 11 aa, Artificial Sequence
  Description of Artificial Sequence: Synthetic Linker
RFRDRLPEKLR

SEQ ID NO: 210255 - protein, 12 aa, Artificial Sequence
  Description of Artificial Sequence: Synthetic Linker
DAPQQDPEGNKT

SEQ ID NO: 210256 - protein, 4 aa, Artificial Sequence
  Description of Artificial Sequence: Synthetic Linker
ELPL

SEQ ID NO: 210257 - protein, 4 aa, Artificial Sequence
  Description of Artificial Sequence: Synthetic Linker
VHGK

SEQ ID NO: 210258 - protein, 5 aa, Artificial Sequence
  Description of Artificial Sequence: Synthetic Linker
TNTEK

SEQ ID NO: 210259 - protein, 9 aa, Artificial Sequence
  Description of Artificial Sequence: Synthetic Linker
DSPLKYWPK

SEQ ID NO: 210260 - protein, 12 aa, Artificial Sequence
  Description of Artificial Sequence: Synthetic Linker
SCSEPRCFNGGT

SEQ ID NO: 210261 - protein, 4 aa, Artificial Sequence
  Description of Artificial Sequence: Synthetic Linker
IDGK

SEQ ID NO: 210262 - protein, 5 aa, Artificial Sequence
  Description of Artificial Sequence: Synthetic Linker
PLEGT

SEQ ID NO: 210263 - protein, 9 aa, Artificial Sequence
  Description of Artificial Sequence: Synthetic Linker
AMPGWQDKV

SEQ ID NO: 210264 - protein, 8 aa, Artificial Sequence
  Description of Artificial Sequence: Synthetic Linker
YKKTARPK

SEQ ID NO: 210265 - protein, 12 aa, Artificial Sequence
  Description of Artificial Sequence: Synthetic Linker
TWAPHPRPLPQA

SEQ ID NO: 210266 - protein, 7 aa, Artificial Sequence
  Description of Artificial Sequence: Synthetic Linker
ELNEEMP

SEQ ID NO: 210267 - protein, 17 aa, Artificial Sequence
  Description of Artificial Sequence: Synthetic Linker
IVDYSPQQEGKVFFGAW

SEQ ID NO: 210268 - protein, 6 aa, Artificial Sequence
  Description of Artificial Sequence: Synthetic Linker
QRVRNR

SEQ ID NO: 210269 - protein, 5 aa, Artificial Sequence
  Description of Artificial Sequence: Synthetic Linker
LFVKP

SEQ ID NO: 210270 - protein, 6 aa, Artificial Sequence
  Description of Artificial Sequence: Synthetic Linker
NLNLTP

SEQ ID NO: 210271 - protein, 18 aa, Artificial Sequence
  Description of Artificial Sequence: Synthetic Linker
YSKKAPPQEEIEFVGEHP

SEQ ID NO: 210272 - protein, 4 aa, Artificial Sequence
  Description of Artificial Sequence: Synthetic Linker
IHSP

SEQ ID NO: 210273 - protein, 4 aa, Artificial Sequence
  Description of Artificial Sequence: Synthetic Linker
LTDS

SEQ ID NO: 210274 - protein, 5 aa, Artificial Sequence
  Description of Artificial Sequence: Synthetic Linker
KDGRL

SEQ ID NO: 210275 - protein, 9 aa, Artificial Sequence
  Description of Artificial Sequence: Synthetic Linker
ARINEREET

SEQ ID NO: 210276 - protein, 19 aa, Artificial Sequence
  Description of Artificial Sequence: Synthetic Linker
LWNCAPPQSEVVYRPLVSL

SEQ ID NO: 210277 - protein, 5 aa, Artificial Sequence
  Description of Artificial Sequence: Synthetic Linker
EFPEV

SEQ ID NO: 210278 - protein, 7 aa, Artificial Sequence
  Description of Artificial Sequence: Synthetic Linker
RTASHSI

SEQ ID NO: 210279 - protein, 21 aa, Artificial Sequence
  Description of Artificial Sequence: Synthetic Linker
EDGVIRRRVALLDPVKVNTKV

SEQ ID NO: 210280 - protein, 9 aa, Artificial Sequence
  Description of Artificial Sequence: Synthetic Linker
VLAGGKSGV

SEQ ID NO: 210281 - protein, 4 aa, Artificial Sequence
  Description of Artificial Sequence: Synthetic Linker
QKHV

SEQ ID NO: 210282 - protein, 5 aa, Artificial Sequence
  Description of Artificial Sequence: Synthetic Linker
VAPLI

SEQ ID NO: 210283 - protein, 6 aa, Artificial Sequence
  Description of Artificial Sequence: Synthetic Linker
AADTGL

SEQ ID NO: 210284 - protein, 6 aa, Artificial Sequence
  Description of Artificial Sequence: Synthetic Linker
FANDPQ

SEQ ID NO: 210285 - protein, 6 aa, Artificial Sequence
  Description of Artificial Sequence: Synthetic Linker
LLDHHQ

SEQ ID NO: 210286 - protein, 9 aa, Artificial Sequence
  Description of Artificial Sequence: Synthetic Linker
SSPHALGVI

SEQ ID NO: 210287 - protein, 11 aa, Artificial Sequence
  Description of Artificial Sequence: Synthetic Linker
SERSFPDDLNM

SEQ ID NO: 210288 - protein, 21 aa, Artificial Sequence
  Description of Artificial Sequence: Synthetic Linker
DMGYLGPDPVARSLRTRRAGA

SEQ ID NO: 210289 - protein, 5 aa, Artificial Sequence
  Description of Artificial Sequence: Synthetic Linker
EMPSL

SEQ ID NO: 210290 - protein, 5 aa, Artificial Sequence
  Description of Artificial Sequence: Synthetic Linker
RREDI

SEQ ID NO: 210291 - protein, 8 aa, Artificial Sequence
  Description of Artificial Sequence: Synthetic Linker
IHYDWPGN

SEQ ID NO: 210292 - protein, 9 aa, Artificial Sequence
  Description of Artificial Sequence: Synthetic Linker
LLTGEYISE

SEQ ID NO: 210293 - protein, 11 aa, Artificial Sequence
  Description of Artificial Sequence: Synthetic Linker
RNRKVVKGFTP

SEQ ID NO: 210294 - protein, 17 aa, Artificial Sequence
  Description of Artificial Sequence: Synthetic Linker
IAATPIKTEYSGEIQPL

SEQ ID NO: 210295 - protein, 4 aa, Artificial Sequence
  Description of Artificial Sequence: Synthetic Linker
NQYR

SEQ ID NO: 210296 - protein, 7 aa, Artificial Sequence
  Description of Artificial Sequence: Synthetic Linker
EMGLSLQ

SEQ ID NO: 210297 - protein, 7 aa, Artificial Sequence
  Description of Artificial Sequence: Synthetic Linker
KDSAQNS

SEQ ID NO: 210298 - protein, 11 aa, Artificial Sequence
  Description of Artificial Sequence: Synthetic Linker
HDVELNLDYEE

SEQ ID NO: 210299 - protein, 5 aa, Artificial Sequence
  Description of Artificial Sequence: Synthetic Linker
PVDAQ

SEQ ID NO: 210300 - protein, 5 aa, Artificial Sequence
  Description of Artificial Sequence: Synthetic Linker
VPIIE

SEQ ID NO: 210301 - protein, 7 aa, Artificial Sequence
  Description of Artificial Sequence: Synthetic Linker
GVFDGGK

SEQ ID NO: 210302 - protein, 4 aa, Artificial Sequence
  Description of Artificial Sequence: Synthetic Linker
YLRE

SEQ ID NO: 210303 - protein, 6 aa, Artificial Sequence
  Description of Artificial Sequence: Synthetic Linker
IEEDSP

SEQ ID NO: 210304 - protein, 5 aa, Artificial Sequence
  Description of Artificial Sequence: Synthetic Linker
RKSFL

SEQ ID NO: 210305 - protein, 7 aa, Artificial Sequence
  Description of Artificial Sequence: Synthetic Linker
DILDDDR

SEQ ID NO: 210306 - protein, 7 aa, Artificial Sequence
  Description of Artificial Sequence: Synthetic Linker
SGKGGDK

SEQ ID NO: 210307 - protein, 15 aa, Artificial Sequence
  Description of Artificial Sequence: Synthetic Linker
MGGTFTDKDPFRSGR

SEQ ID NO: 210308 - protein, 4 aa, Artificial Sequence
  Description of Artificial Sequence: Synthetic Linker
VEER

SEQ ID NO: 210309 - protein, 7 aa, Artificial Sequence
  Description of Artificial Sequence: Synthetic Linker
ELPELTA

SEQ ID NO: 210310 - protein, 11 aa, Artificial Sequence
  Description of Artificial Sequence: Synthetic Linker
IKRFGVEDGSV

SEQ ID NO: 210311 - protein, 4 aa, Artificial Sequence
  Description of Artificial Sequence: Synthetic Linker
AYRW

SEQ ID NO: 210312 - protein, 4 aa, Artificial Sequence
  Description of Artificial Sequence: Synthetic Linker
EDAL

SEQ ID NO: 210313 - protein, 7 aa, Artificial Sequence
  Description of Artificial Sequence: Synthetic Linker
IRTVGEA

SEQ ID NO: 210314 - protein, 15 aa, Artificial Sequence
  Description of Artificial Sequence: Synthetic Linker
ETGLNAYLPGLAGKE

SEQ ID NO: 210315 - protein, 9 aa, Artificial Sequence
  Description of Artificial Sequence: Synthetic Linker
LEGRIKGKE

SEQ ID NO: 210316 - protein, 5 aa, Artificial Sequence
  Description of Artificial Sequence: Synthetic Linker
RMRNF

SEQ ID NO: 210317 - protein, 6 aa, Artificial Sequence
  Description of Artificial Sequence: Synthetic Linker
RGVLPE

SEQ ID NO: 210318 - protein, 6 aa, Artificial Sequence
  Description of Artificial Sequence: Synthetic Linker
SLEEQR

SEQ ID NO: 210319 - protein, 7 aa, Artificial Sequence
  Description of Artificial Sequence: Synthetic Linker
ANQLQNY

SEQ ID NO: 210320 - protein, 7 aa, Artificial Sequence
  Description of Artificial Sequence: Synthetic Linker
NYLLPAG

SEQ ID NO: 210321 - protein, 14 aa, Artificial Sequence
  Description of Artificial Sequence: Synthetic Linker
LDWQPRENPFQNLK

SEQ ID NO: 210322 - protein, 4 aa, Artificial Sequence
  Description of Artificial Sequence: Synthetic Linker
RIQM

SEQ ID NO: 210323 - protein, 4 aa, Artificial Sequence
  Description of Artificial Sequence: Synthetic Linker
WTDP

SEQ ID NO: 210324 - protein, 5 aa, Artificial Sequence
  Description of Artificial Sequence: Synthetic Linker
ELGLL

SEQ ID NO: 210325 - protein, 7 aa, Artificial Sequence
  Description of Artificial Sequence: Synthetic Linker
APSHGQI

SEQ ID NO: 210326 - protein, 8 aa, Artificial Sequence
  Description of Artificial Sequence: Synthetic Linker
ATGMVDER

SEQ ID NO: 210327 - protein, 5 aa, Artificial Sequence
  Description of Artificial Sequence: Synthetic Linker
FSLDE

SEQ ID NO: 210328 - protein, 6 aa, Artificial Sequence
  Description of Artificial Sequence: Synthetic Linker
HWKLEA

SEQ ID NO: 210329 - protein, 4 aa, Artificial Sequence
  Description of Artificial Sequence: Synthetic Linker
SEIG

SEQ ID NO: 210330 - protein, 8 aa, Artificial Sequence
  Description of Artificial Sequence: Synthetic Linker
KGIGHSRF

SEQ ID NO: 210331 - protein, 5 aa, Artificial Sequence
  Description of Artificial Sequence: Synthetic Linker
EGIKD

SEQ ID NO: 210332 - protein, 7 aa, Artificial Sequence
  Description of Artificial Sequence: Synthetic Linker
LSRFPTP

SEQ ID NO: 210333 - protein, 15 aa, Artificial Sequence
  Description of Artificial Sequence: Synthetic Linker
LLSPYHHVSGYSPRY

SEQ ID NO: 210334 - protein, 4 aa, Artificial Sequence
  Description of Artificial Sequence: Synthetic Linker
PGDW

SEQ ID NO: 210335 - protein, 6 aa, Artificial Sequence
  Description of Artificial Sequence: Synthetic Linker
DINKNE

SEQ ID NO: 210336 - protein, 6 aa, Artificial Sequence
  Description of Artificial Sequence: Synthetic Linker
ITPYAE

SEQ ID NO: 210337 - protein, 7 aa, Artificial Sequence
  Description of Artificial Sequence: Synthetic Linker
EFQSIGD

SEQ ID NO: 210338 - protein, 7 aa, Artificial Sequence
  Description of Artificial Sequence: Synthetic Linker
KDPEGNV

SEQ ID NO: 210339 - protein, 7 aa, Artificial Sequence
  Description of Artificial Sequence: Synthetic Linker
SLSVIGE

SEQ ID NO: 210340 - protein, 7 aa, Artificial Sequence
  Description of Artificial Sequence: Synthetic Linker
SPVNSKR

SEQ ID NO: 210341 - protein, 8 aa, Artificial Sequence
  Description of Artificial Sequence: Synthetic Linker
ENTRGFHG

SEQ ID NO: 210342 - protein, 8 aa, Artificial Sequence
  Description of Artificial Sequence: Synthetic Linker
NNLKRDYT

SEQ ID NO: 210343 - protein, 10 aa, Artificial Sequence
  Description of Artificial Sequence: Synthetic Linker
KYEDFRSPSA

SEQ ID NO: 210344 - protein, 24 aa, Artificial Sequence
  Description of Artificial Sequence: Synthetic Linker
YPRLTNKIPKPPQEVKPHPYGVDR

SEQ ID NO: 210345 - protein, 7 aa, Artificial Sequence
  Description of Artificial Sequence: Synthetic Linker
ARDRSYE

SEQ ID NO: 210346 - protein, 13 aa, Artificial Sequence
  Description of Artificial Sequence: Synthetic Linker
VTSTVKNDIYAHI

SEQ ID NO: 210347 - protein, 22 aa, Artificial Sequence
  Description of Artificial Sequence: Synthetic Linker
PYSERYGYRPALIPRPVMAGTL

SEQ ID NO: 210348 - protein, 5 aa, Artificial Sequence
  Description of Artificial Sequence: Synthetic Linker
VSQPG

SEQ ID NO: 210349 - protein, 6 aa, Artificial Sequence
  Description of Artificial Sequence: Synthetic Linker
LEGLPY

SEQ ID NO: 210350 - protein, 4 aa, Artificial Sequence
  Description of Artificial Sequence: Synthetic Linker
QPGV

SEQ ID NO: 210351 - protein, 5 aa, Artificial Sequence
  Description of Artificial Sequence: Synthetic Linker
WKLEG

SEQ ID NO: 210352 - protein, 6 aa, Artificial Sequence
  Description of Artificial Sequence: Synthetic Linker
TAYNAP

SEQ ID NO: 210353 - protein, 11 aa, Artificial Sequence
  Description of Artificial Sequence: Synthetic Linker
HKHDLSETNVY

SEQ ID NO: 210354 - protein, 7 aa, Artificial Sequence
  Description of Artificial Sequence: Synthetic Linker
VLQAVTD

SEQ ID NO: 210355 - protein, 4 aa, Artificial Sequence
  Description of Artificial Sequence: Synthetic Linker
YKDK

SEQ ID NO: 210356 - protein, 6 aa, Artificial Sequence
  Description of Artificial Sequence: Synthetic Linker
NLPFNM

SEQ ID NO: 210357 - protein, 6 aa, Artificial Sequence
  Description of Artificial Sequence: Synthetic Linker
WGVKDP

SEQ ID NO: 210358 - protein, 13 aa, Artificial Sequence
  Description of Artificial Sequence: Synthetic Linker
QKKKYGDKVPENL

SEQ ID NO: 210359 - protein, 14 aa, Artificial Sequence
  Description of Artificial Sequence: Synthetic Linker
NDLVEFNRFTNSPL

SEQ ID NO: 210360 - protein, 10 aa, Artificial Sequence
  Description of Artificial Sequence: Synthetic Linker
LKEQESPVKV

SEQ ID NO: 210361 - protein, 6 aa, Artificial Sequence
  Description of Artificial Sequence: Synthetic Linker
EEGIAN

SEQ ID NO: 210362 - protein, 11 aa, Artificial Sequence
  Description of Artificial Sequence: Synthetic Linker
ADFQGAGRRFD

SEQ ID NO: 210363 - protein, 6 aa, Artificial Sequence
  Description of Artificial Sequence: Synthetic Linker
AAGLPR

SEQ ID NO: 210364 - protein, 10 aa, Artificial Sequence
  Description of Artificial Sequence: Synthetic Linker
TFTGLPHRFE

SEQ ID NO: 210365 - protein, 4 aa, Artificial Sequence
  Description of Artificial Sequence: Synthetic Linker
TTVD

SEQ ID NO: 210366 - protein, 4 aa, Artificial Sequence
  Description of Artificial Sequence: Synthetic Linker
DNLR

SEQ ID NO: 210367 - protein, 5 aa, Artificial Sequence
  Description of Artificial Sequence: Synthetic Linker
FYHEP

SEQ ID NO: 210368 - protein, 6 aa, Artificial Sequence
  Description of Artificial Sequence: Synthetic Linker
ALGYPL

SEQ ID NO: 210369 - protein, 6 aa, Artificial Sequence
  Description of Artificial Sequence: Synthetic Linker
LLGEIS

SEQ ID NO: 210370 - protein, 6 aa, Artificial Sequence
  Description of Artificial Sequence: Synthetic Linker
MGTVGN

SEQ ID NO: 210371 - protein, 6 aa, Artificial Sequence
  Description of Artificial Sequence: Synthetic Linker
TGTNGK

SEQ ID NO: 210372 - protein, 10 aa, Artificial Sequence
  Description of Artificial Sequence: Synthetic Linker
RLQPVCGRME

SEQ ID NO: 210373 - protein, 12 aa, Artificial Sequence
  Description of Artificial Sequence: Synthetic Linker
TSEAHEKPEEKR

SEQ ID NO: 210374 - protein, 16 aa, Artificial Sequence
  Description of Artificial Sequence: Synthetic Linker
NFGGYFPNKLAEYHDF

SEQ ID NO: 210375 - protein, 15 aa, Artificial Sequence
  Description of Artificial Sequence: Synthetic Linker
RFAPPTWERIYPLDL

SEQ ID NO: 210376 - protein, 4 aa, Artificial Sequence
  Description of Artificial Sequence: Synthetic Linker
VFQP

SEQ ID NO: 210377 - protein, 13 aa, Artificial Sequence
  Description of Artificial Sequence: Synthetic Linker
EKASPAFYPQGQE

SEQ ID NO: 210378 - protein, 35 aa, Artificial Sequence
  Description of Artificial Sequence: Synthetic Linker
SMAVRFAKVPPDAAKAFIADRSMLFNGGTASRPPV

SEQ ID NO: 210379 - protein, 4 aa, Artificial Sequence
  Description of Artificial Sequence: Synthetic Linker
VLKL

SEQ ID NO: 210380 - protein, 6 aa, Artificial Sequence
  Description of Artificial Sequence: Synthetic Linker
DLKNSK

SEQ ID NO: 210381 - protein, 9 aa, Artificial Sequence
  Description of Artificial Sequence: Synthetic Linker
LKKDFQGVE

SEQ ID NO: 210382 - protein, 4 aa, Artificial Sequence
  Description of Artificial Sequence: Synthetic Linker
GYTG

SEQ ID NO: 210383 - protein, 4 aa, Artificial Sequence
  Description of Artificial Sequence: Synthetic Linker
PMSD

SEQ ID NO: 210384 - protein, 4 aa, Artificial Sequence
  Description of Artificial Sequence: Synthetic Linker
SDPE

SEQ ID NO: 210385 - protein, 5 aa, Artificial Sequence
  Description of Artificial Sequence: Synthetic Linker
DAPGQ

SEQ ID NO: 210386 - protein, 5 aa, Artificial Sequence
  Description of Artificial Sequence: Synthetic Linker
FEQTL

SEQ ID NO: 210387 - protein, 5 aa, Artificial Sequence
  Description of Artificial Sequence: Synthetic Linker
GGLSQ

SEQ ID NO: 210388 - protein, 6 aa, Artificial Sequence
  Description of Artificial Sequence: Synthetic Linker
AGENEI

SEQ ID NO: 210389 - protein, 6 aa, Artificial Sequence
  Description of Artificial Sequence: Synthetic Linker
QRCGFV

SEQ ID NO: 210390 - protein, 6 aa, Artificial Sequence
  Description of Artificial Sequence: Synthetic Linker
RQREGT

SEQ ID NO: 210391 - protein, 7 aa, Artificial Sequence
  Description of Artificial Sequence: Synthetic Linker
HGNNPLA

SEQ ID NO: 210392 - protein, 8 aa, Artificial Sequence
  Description of Artificial Sequence: Synthetic Linker
GAHYRTSP

SEQ ID NO: 210393 - protein, 8 aa, Artificial Sequence
  Description of Artificial Sequence: Synthetic Linker
QYTQDLDY

SEQ ID NO: 210394 - protein, 11 aa, Artificial Sequence
  Description of Artificial Sequence: Synthetic Linker
WAGFRRPRGNL

SEQ ID NO: 210395 - protein, 13 aa, Artificial Sequence
  Description of Artificial Sequence: Synthetic Linker
MGNHREASSGCYT

SEQ ID NO: 210396 - protein, 17 aa, Artificial Sequence
  Description of Artificial Sequence: Synthetic Linker
LVFDDENFTHTPQGNIV

SEQ ID NO: 210397 - protein, 6 aa, Artificial Sequence
  Description of Artificial Sequence: Synthetic Linker
ALPGFQ

SEQ ID NO: 210398 - protein, 14 aa, Artificial Sequence
  Description of Artificial Sequence: Synthetic Linker
RASSVAERHVSPDT

SEQ ID NO: 210399 - protein, 7 aa, Artificial Sequence
  Description of Artificial Sequence: Synthetic Linker
KISSGDW

SEQ ID NO: 210400 - protein, 7 aa, Artificial Sequence
  Description of Artificial Sequence: Synthetic Linker
SKSKNPI

SEQ ID NO: 210401 - protein, 11 aa, Artificial Sequence
  Description of Artificial Sequence: Synthetic Linker
FMNKDGCAGFT

SEQ ID NO: 210402 - protein, 4 aa, Artificial Sequence
  Description of Artificial Sequence: Synthetic Linker
IMGS

SEQ ID NO: 210403 - protein, 4 aa, Artificial Sequence
  Description of Artificial Sequence: Synthetic Linker
KPYK

SEQ ID NO: 210404 - protein, 5 aa, Artificial Sequence
  Description of Artificial Sequence: Synthetic Linker
EGPPM

SEQ ID NO: 210405 - protein, 5 aa, Artificial Sequence
  Description of Artificial Sequence: Synthetic Linker
LGAEI

SEQ ID NO: 210406 - protein, 5 aa, Artificial Sequence
  Description of Artificial Sequence: Synthetic Linker
YIPEK

SEQ ID NO: 210407 - protein, 6 aa, Artificial Sequence
  Description of Artificial Sequence: Synthetic Linker
GEKLNI

SEQ ID NO: 210408 - protein, 6 aa, Artificial Sequence
  Description of Artificial Sequence: Synthetic Linker
NKGYHI

SEQ ID NO: 210409 - protein, 7 aa, Artificial Sequence
  Description of Artificial Sequence: Synthetic Linker
CIETGEI

SEQ ID NO: 210410 - protein, 11 aa, Artificial Sequence
  Description of Artificial Sequence: Synthetic Linker
TGNPLLWSDDL

SEQ ID NO: 210411 - protein, 8 aa, Artificial Sequence
  Description of Artificial Sequence: Synthetic Linker
KHEYQDRF

SEQ ID NO: 210412 - protein, 9 aa, Artificial Sequence
  Description of Artificial Sequence: Synthetic Linker
CRFGYRDSI

SEQ ID NO: 210413 - protein, 9 aa, Artificial Sequence
  Description of Artificial Sequence: Synthetic Linker
RLDPTTVTP

SEQ ID NO: 210414 - protein, 11 aa, Artificial Sequence
  Description of Artificial Sequence: Synthetic Linker
PKEWQPVLTYG

SEQ ID NO: 210415 - protein, 19 aa, Artificial Sequence
  Description of Artificial Sequence: Synthetic Linker
CNTTKCNEGPILELENLPQ

SEQ ID NO: 210416 - protein, 24 aa, Artificial Sequence
  Description of Artificial Sequence: Synthetic Linker
CGLDLCNQGNSGRAVTYSRSRYLE

SEQ ID NO: 210417 - protein, 7 aa, Artificial Sequence
  Description of Artificial Sequence: Synthetic Linker
SFPKDPE

SEQ ID NO: 210418 - protein, 8 aa, Artificial Sequence
  Description of Artificial Sequence: Synthetic Linker
VRTEIAKK

SEQ ID NO: 210419 - protein, 14 aa, Artificial Sequence
  Description of Artificial Sequence: Synthetic Linker
IIRKDQRLKFGEGI

SEQ ID NO: 210420 - protein, 11 aa, Artificial Sequence
  Description of Artificial Sequence: Synthetic Linker
EQLLGTSFLTR

SEQ ID NO: 210421 - protein, 25 aa, Artificial Sequence
  Description of Artificial Sequence: Synthetic Linker
PHDQCACGVLTSEKRAPDLQDLPWQ

SEQ ID NO: 210422 - protein, 8 aa, Artificial Sequence
  Description of Artificial Sequence: Synthetic Linker
KVSGENHV

SEQ ID NO: 210423 - protein, 6 aa, Artificial Sequence
  Description of Artificial Sequence: Synthetic Linker
NVAEDY

SEQ ID NO: 210424 - protein, 4 aa, Artificial Sequence
  Description of Artificial Sequence: Synthetic Linker
IDWR

SEQ ID NO: 210425 - protein, 4 aa, Artificial Sequence
  Description of Artificial Sequence: Synthetic Linker
RKGS

SEQ ID NO: 210426 - protein, 5 aa, Artificial Sequence
  Description of Artificial Sequence: Synthetic Linker
LFKSP

SEQ ID NO: 210427 - protein, 8 aa, Artificial Sequence
  Description of Artificial Sequence: Synthetic Linker
QNLTAPAT

SEQ ID NO: 210428 - protein, 6 aa, Artificial Sequence
  Description of Artificial Sequence: Synthetic Linker
YAPRPR

SEQ ID NO: 210429 - protein, 7 aa, Artificial Sequence
  Description of Artificial Sequence: Synthetic Linker
YGPDGQR

SEQ ID NO: 210430 - protein, 9 aa, Artificial Sequence
  Description of Artificial Sequence: Synthetic Linker
VSQKTFPQL

SEQ ID NO: 210431 - protein, 17 aa, Artificial Sequence
  Description of Artificial Sequence: Synthetic Linker
GVSDDDAFEVGLTCGGI

SEQ ID NO: 210432 - protein, 4 aa, Artificial Sequence
  Description of Artificial Sequence: Synthetic Linker
FNDK

SEQ ID NO: 210433 - protein, 4 aa, Artificial Sequence
  Description of Artificial Sequence: Synthetic Linker
HDRN

SEQ ID NO: 210434 - protein, 5 aa, Artificial Sequence
  Description of Artificial Sequence: Synthetic Linker
KVKAD

SEQ ID NO: 210435 - protein, 6 aa, Artificial Sequence
  Description of Artificial Sequence: Synthetic Linker
EAGISS

SEQ ID NO: 210436 - protein, 6 aa, Artificial Sequence
  Description of Artificial Sequence: Synthetic Linker
IKASWA

SEQ ID NO: 210437 - protein, 6 aa, Artificial Sequence
  Description of Artificial Sequence: Synthetic Linker
LTRGFA

SEQ ID NO: 210438 - protein, 7 aa, Artificial Sequence
  Description of Artificial Sequence: Synthetic Linker
LNGRARA

SEQ ID NO: 210439 - protein, 7 aa, Artificial Sequence
  Description of Artificial Sequence: Synthetic Linker
SLATFDS

SEQ ID NO: 210440 - protein, 8 aa, Artificial Sequence
  Description of Artificial Sequence: Synthetic Linker
ALPEGHAK

SEQ ID NO: 210441 - protein, 8 aa, Artificial Sequence
  Description of Artificial Sequence: Synthetic Linker
ATTGVEGL

SEQ ID NO: 210442 - protein, 8 aa, Artificial Sequence
  Description of Artificial Sequence: Synthetic Linker
RPKSTEKL

SEQ ID NO: 210443 - protein, 9 aa, Artificial Sequence
  Description of Artificial Sequence: Synthetic Linker
YTSRKKTHE

SEQ ID NO: 210444 - protein, 10 aa, Artificial Sequence
  Description of Artificial Sequence: Synthetic Linker
ASPYHLGIND

SEQ ID NO: 210445 - protein, 10 aa, Artificial Sequence
  Description of Artificial Sequence: Synthetic Linker
GLQDWNVTPE

SEQ ID NO: 210446 - protein, 10 aa, Artificial Sequence
  Description of Artificial Sequence: Synthetic Linker
LDRKSGDYNQ

SEQ ID NO: 210447 - protein, 13 aa, Artificial Sequence
  Description of Artificial Sequence: Synthetic Linker
LLDRDLNLNLPPV

SEQ ID NO: 210448 - protein, 13 aa, Artificial Sequence
  Description of Artificial Sequence: Synthetic Linker
SEGLLPLDNHYHF

SEQ ID NO: 210449 - protein, 14 aa, Artificial Sequence
  Description of Artificial Sequence: Synthetic Linker
ESPVDSEQRGENDL

SEQ ID NO: 210450 - protein, 15 aa, Artificial Sequence
  Description of Artificial Sequence: Synthetic Linker
ALHDMNVELEEKTSH

SEQ ID NO: 210451 - protein, 15 aa, Artificial Sequence
  Description of Artificial Sequence: Synthetic Linker
VDKAPYRFTHGWTYS

SEQ ID NO: 210452 - protein, 16 aa, Artificial Sequence
  Description of Artificial Sequence: Synthetic Linker
HRGAHIYMNSWQSIDF

SEQ ID NO: 210453 - protein, 17 aa, Artificial Sequence
  Description of Artificial Sequence: Synthetic Linker
RENGLVRSPGGFPGEDL

SEQ ID NO: 210454 - protein, 18 aa, Artificial Sequence
  Description of Artificial Sequence: Synthetic Linker
VAGVGTRSSDGFQTSGDY

SEQ ID NO: 210455 - protein, 21 aa, Artificial Sequence
  Description of Artificial Sequence: Synthetic Linker
EIHVEQKLPQKLSAKAKELPI

SEQ ID NO: 210456 - protein, 6 aa, Artificial Sequence
  Description of Artificial Sequence: Synthetic Linker
RWQSFN

SEQ ID NO: 210457 - protein, 9 aa, Artificial Sequence
  Description of Artificial Sequence: Synthetic Linker
SLTARPGFL

SEQ ID NO: 210458 - protein, 10 aa, Artificial Sequence
  Description of Artificial Sequence: Synthetic Linker
LRIPFSEHLG

SEQ ID NO: 210459 - protein, 10 aa, Artificial Sequence
  Description of Artificial Sequence: Synthetic Linker
VVGGQQGSLE

SEQ ID NO: 210460 - protein, 13 aa, Artificial Sequence
  Description of Artificial Sequence: Synthetic Linker
DDFDKDTLNINFQ

SEQ ID NO: 210461 - protein, 13 aa, Artificial Sequence
  Description of Artificial Sequence: Synthetic Linker
YGRESLQSKFTQA

SEQ ID NO: 210462 - protein, 18 aa, Artificial Sequence
  Description of Artificial Sequence: Synthetic Linker
VEAPDLPQQEWAPTYEER

SEQ ID NO: 210463 - protein, 31 aa, Artificial Sequence
  Description of Artificial Sequence: Synthetic Linker
IGCPGDTQGDTYLSKGDKRVNEDAVRGLKAE

SEQ ID NO: 210464 - protein, 20 aa, Artificial Sequence
  Description of Artificial Sequence: Synthetic Linker
FQGYYLVSPSETFLERDVLK

SEQ ID NO: 210465 - protein, 6 aa, Artificial Sequence
  Description of Artificial Sequence: Synthetic Linker
GSGSGS

SEQ ID NO: 210466 - DNA, 18 bp, Artificial Sequence
  Description of Artificial Sequence: Synthetic Linker
ggatcaggttccggatcc

SEQ ID NO: 210467 - protein, 8 aa, Artificial Sequence
  Description of Artificial Sequence: Synthetic Linker
GSGSGSGS

SEQ ID NO: 210468 - DNA, 24 bp, Artificial Sequence
  Description of Artificial Sequence: Synthetic Linker
ggatctggttccggatcaggatcc

SEQ ID NO: 210469 - protein, 10 aa, Artificial Sequence
  Description of Artificial Sequence: Synthetic Linker
GSGSGGGSGS

SEQ ID NO: 210470 - DNA, 30 bp, Artificial Sequence
  Description of Artificial Sequence: Synthetic Linker
ggatcaggttccggaggtggatctggatcc

SEQ ID NO: 210471 - protein, 8 aa, Artificial Sequence
  Description of Artificial Sequence: Synthetic Linker
  MOD_RES (2)..(2): Any amino acid
  MOD_RES (4)..(4): Any amino acid
DXEXNPGP

SEQ ID NO: 210472 - protein, 7 aa, Artificial Sequence
  Description of Artificial Sequence: Synthetic Linker
SGSGSGS

SEQ ID NO: 210473 - protein, 10 aa, Artificial Sequence
  Description of Artificial Sequence: Synthetic Linker
  MOD_RES (3)..(4): Any amino acid
  MOD_RES (6)..(9): Any amino acid
HDXXHXXXXN

SEQ ID NO: 210474 - protein, 4 aa, Artificial Sequence
  Description of Artificial Sequence: Synthetic Linker
GSSG

SEQ ID NO: 210475 - DNA, 12 bp, Artificial Sequence
  Description of Artificial Sequence: Synthetic Linker
ggatccagcggc

SEQ ID NO: 210476 - DNA, 603 bp, Artificial Sequence
  Description of Artificial Sequence: Synthetic Promoter sequence
aagcttgggagttccgcgttacataacttacggtaaatggcccgcctggctgaccgcccaacgacccccgcccattgacgtcaataatgacgtatgttcccatagtaacgccaatagggactttccattgacgtcaatgggtggagtatttacggtaaactgcccacttggcagtacatcaagtgtatcatatgccaagtacgccccctattgacgtcaatgacggtaaatggcccgcctggcattatgcccagtacatgaccttatgggactttcctacttggcagtacatctacgtattagtcatcgctattaccatggtgatgcggttttggcagtacatcaatgggcgtggatagcggtttgactcacggggatttccaagtctccaccccattgacgtcaatgggagtttgttttggcaccaaaatcaacgggactttccaaaatgtcgtaacaactccgccccattgacgcaaatgggcggtaggcgtgtacggtgggaggtctatataagcagagctcgtttagtgaaccgtcagatcgcctggagacgccatccacgctgttttgacctccatagaagacaccgactctactaga

SEQ ID NO: 210477 - DNA, 603 bp, Artificial Sequence
  Description of Artificial Sequence: Synthetic Promoter sequence
aagcttgggagttccgcgttacataacttacggtaaatggcccgcctggctgaccgcccaacgacccccgcccattgacgtcaataatgacgtatgttcccatagtaacgccaatagggactttccattgacgtcaatgggtggagtatttacggtaaactgcccacttggcagtacatcaagtgtatcatatgccaagtacgccccctattgacgtcaatgacggtaaatggcccgcctggcattatgcccagtacatgaccttacgggactttcctacttggcagtacatctacgtattagtcatcgctattaccatggtgatgcggttttggcagtacaccaatgggcgtggatagcggtttgactcacggggatttccaagtctccaccccattgacgtcaatgggagtttgttttggcaccaaaatcaacgggactttccaaaatgtcgtaacaactccgccccattgacgcaaatgggcggtaggcgtgtacggtgggaggtctatataagcagagctcgtttagtgaaccgtcagatcgcctggagacgccatccacgctgttttgacctccatagaagacaccgactctactaga

SEQ ID NO: 210478 - DNA, 508 bp, Artificial Sequence
  Description of Artificial Sequence: Synthetic Promoter sequence
cgttacataacttacggtaaatggcccgcctggctgaccgcccaacgacccccgcccattgacgtcaataatgacgtatgttcccatagtaacgccaatagggactttccattgacgtcaatgggtggagtatttacggtaaactgcccacttggcagtacatcaagtgtatcatatgccaagtacgccccctattgacgtcaatgacggtaaatggcccgcctggcattatgcccagtacatgaccttatgggactttcctacttggcagtacatctacgtattagtcatcgctattaccatggtgatgcggttttggcagtacatcaatgggcgtggatagcggtttgactcacggggatttccaagtctccaccccattgacgtcaatgggagtttgttttggcaccaaaatcaacgggactttccaaaatgtcgtaacaactccgccccattgacgcaaatgggcggtaggcgtgtacggtgggaggtctatataagcagagct

SEQ ID NO: 210479 - DNA, 1339 bp, Artificial Sequence
  Description of Artificial Sequence: Synthetic Promoter sequence
cgatagtaattcatacaaaaggactcgcccctgccttggggaatcccagggaccgtcgttaaactcccactaacgtagaacccagagatcgctgcgttcccgccccctcacccgcccgctctcgtcatcactgaggtggagaagagcatgcgtgaggctccggtgcccgtcagtgggcagagcgcacatcgcccacagtccccgagaagttggggggaggggtcggcaattgaaccggtgcctagagaaggtggcgcggggtaaactgggaaagtgatgtcgtgtactggctccgcctttttcccgagggtgggggagaaccgtatataagtgcagtagtcgccgtgaacgttctttttcgcaacgggtttgccgccagaacacaggtaagtgccgtgtgtggttcccgcgggcctggcctctttacgggttatggcccttgcgtgccttgaattacttccacgcccctggctgcagtacgtgattcttgatcccgagcttcgggttggaagtgggtgggagagttcgaggccttgcgcttaaggagccccttcgcctcgtgcttgagttgaggcctggcttgggcgctggggccgccgcgtgcgaatctggtggcaccttcgcgcctgtctcgctgctttcgataagtctctagccatttaaaatttttgatgacctgctgcgacgctttttttctggcaagatagtcttgtaaatgcgggccaagatctgcacactggtatttcggtttttggggccgcgggcggcgacggggcccgtgcgtcccagcgcacatgttcggcgaggcggggcctgcgagcgcggccaccgagaatcggacgggggtagtctcaagctggccggcctgctctggtgcctggcctcgcgccgccgtgtatcgccccgccctgggcggcaaggctggcccggtcggcaccagttgcgtgagcggaaagatggccgcttcccggccctgctgcagggagctcaaaatggaggacgcggcgctcgggagagcgggcgggtgagtcacccacacaaaggaaaagggcctttccgtcctcagccgtcgcttcatgtgactccacggagtaccgggcgccgtccaggcacctcgattagttctcgagcttttggagtacgtcgtctttaggttggggggaggggttttatgcgatggagtttccccacactgagtgggtggagactgaagttaggccagcttggcacttgatgtaattctccttggaatttgccctttttgagtttggatcttggttcattctcaagcctcagacagtggttcaaagtttttttcttccatttcaggtgtcgtgag

SEQ ID NO: 210480 - DNA, 1335 bp, Artificial Sequence
  Description of Artificial Sequence: Synthetic Promoter sequence
gagtaattcatacaaaaggactcgcccctgccttggggaatcccagggaccgtcgttaaactcccactaacgtagaacccagagatcgctgcgttcccgccccctcacccgcccgctctcgtcatcactgaggtggagaagagcatgcgtgaggctccggtgcccgtcagtgggcagagcgcacatcgcccacagtccccgagaagttggggggaggggtcggcaattgaaccggtgcctagagaaggtggcgcggggtaaactgggaaagtgatgtcgtgtactggctccgcctttttcccgagggtgggggagaaccgtatataagtgcagtagtcgccgtgaacgttctttttcgcaacgggtttgccgccagaacacaggtaagtgccgtgtgtggttcccgcgggcctggcctctttacgggttatggcccttgcgtgccttgaattacttccacgcccctggctgcagtacgtgattcttgatcccgagcttcgggttggaagtgggtgggagagttcgaggccttgcgcttaaggagccccttcgcctcgtgcttgagttgaggcctggcttgggcgctggggccgccgcgtgcgaatctggtggcaccttcgcgcctgtctcgctgctttcgataagtctctagccatttaaaatttttgatgacctgctgcgacgctttttttctggcaagatagtcttgtaaatgcgggccaagatctgcacactggtatttcggtttttggggccgcgggcggcgacggggcccgtgcgtcccagcgcacatgttcggcgaggcggggcctgcgagcgcggccaccgagaatcggacgggggtagtctcaagctggccggcctgctctggtgcctggcctcgcgccgccgtgtatcgccccgccctgggcggcaaggctggcccggtcggcaccagttgcgtgagcggaaagatggccgcttcccggccctgctgcagggagctcaaaatggaggacgcggcgctcgggagagcgggcgggtgagtcacccacacaaaggaaaagggcctttccgtcctcagccgtcgcttcatgtgactccacggagtaccgggcgccgtccaggcacctcgattagttctcgagcttttggagtacgtcgtctttaggttggggggaggggttttatgcgatggagtttccccacactgagtgggtggagactgaagttaggccagcttggcacttgatgtaattctccttggaatttgccctttttgagtttggatcttggttcattctcaagcctcagacagtggttcaaagtttttttcttccatttcaggtgtcgtga

SEQ ID NO: 210481 - DNA, 1184 bp, Artificial Sequence
  Description of Artificial Sequence: Synthetic Promoter sequence
cgtgaggctccggtgcccgtcagtgggcagagcgcacatcgcccacagtccccgagaagttggggggaggggtcggcaattgaaccggtgcctagagaaggtggcgcggggtaaactgggaaagtgatgtcgtgtactggctccgcctttttcccgagggtgggggagaaccgtatataagtgcagtagtcgccgtgaacgttctttttcgcaacgggtttgccgccagaacacaggtaagtgccgtgtgtggttcccgcgggcctggcctctttacgggttatggcccttgcgtgccttgaattacttccacctggctgcagtacgtgattcttgatcccgagcttcgggttggaagtgggtgggagagttcgaggccttgcgcttaaggagccccttcgcctcgtgcttgagttgaggcctggcctgggcgctggggccgccgcgtgcgaatctggtggcaccttcgcgcctgtctcgctgctttcgataagtctctagccatttaaaatttttgatgacctgctgcgacgctttttttctggcaagatagtcttgtaaatgcgggccaagatctgcacactggtatttcggtttttggggccgcgggcggcgacggggcccgtgcgtcccagcgcacatgttcggcgaggcggggcctgcgagcgcggccaccgagaatcggacgggggtagtctcaagctggccggcctgctctggtgcctggcctcgcgccgccgtgtatcgccccgccctgggcggcaaggctggcccggtcggcaccagttgcgtgagcggaaagatggccgcttcccggccctgctgcagggagctcaaaatggaggacgcggcgctcgggagagcgggcgggtgagtcacccacacaaaggaaaagggcctttccgtcctcagccgtcgcttcatgtgactccacggagtaccgggcgccgtccaggcacctcgattagttctcgagcttttggagtacgtcgtctttaggttggggggaggggttttatgcgatggagtttccccacactgagtgggtggagactgaagttaggccagcttggcacttgatgtaattctccttggaatttgccctttttgagtttggatcttggttcattctcaagcctcagacagtggttcaaagtttttttcttccatttcaggtgtcgtga

SEQ ID NO: 210482 - DNA, 1184 bp, Artificial Sequence
  Description of Artificial Sequence: Synthetic Promoter sequence
cgtgaggctccggtgcccgtcagtgggcagagcgcacatcgcccacagtccccgagaagttggggggaggggtcggcaattgaaccggtgcctagagaaggtggcgcggggtaaactgggaaagtgatgtcgtgtactggctccgcctttttcccgagggtgggggagaaccgtatataagtgcagtagtcgccgtgaacgttctttttcgcaacgggtttgccgccagaacacaggtaagtgccgtgtgtggttcccgcgggcctggcctctttacgggttatggcccttgcgtgccttgaattacttccacctggctgcagtacgtgattcttgatcccgagcttcgggttggaagtgggtgggagagttcgaggccttgcgcttaaggagccccttcgcctcgtgcttgagttgaggcctggcctgggcgctggggccgccgcgtgcgaatctggtggcaccttcgcgcctgtctcgctgctttcgataagtctctagccatttaaaatttttgatgacctgctgcgacgctttttttctggcaagatagtcttgtaaatgcgggccaagatctgcacactggtatttcggtttttggggccgcgggcggcgacggggcccgtgcgtcccagcgcacatgttcggcgaggcggggcctgcgagcgcggccaccgagaatcggacgggggtagtctcaagctggccggcctgctctggtgcctggcctcgcgccgccgtgtatcgccccgccctgggcggcaaggctggcccggtcggcaccagttgcgtgagcggaaagatggccgcttcccggccctgctgcagggagctcaaaatggaggacgcggcgctcgggagagcgggcgggtgagtcacccacacaaaggaaaagggcctttccgtcctcagccgtcgcttcatgtgactccactgagtaccgggcgccgtccaggcacctcgattagttctcgtgcttttggagtacgtcgtctttaggttggggggaggggttttatgcgatggagtttccccacactgagtgggtggagactgaagttaggccagcttggcacttgatgtaattctccttggaatttgccctttttgagtttggatcttggttcattctcaagcctcagacagtggttcaaagtttttttcttccatttcaggtgtcgtga

SEQ ID NO: 210483 - DNA, 1184 bp, Artificial Sequence
  Description of Artificial Sequence: Synthetic Promoter sequence
cgtgaggctccggtgcccgtcagtgggcagagcgcacatcgcccacagtccccgagaagttggggggaggggtcggcaattgaaccggtgcctagagaaggtggcgcggggtaaactgggaaagtgatgtcgtgtactggctccgcctttttcccgagggtgggggagaaccgtatataagtgcagtagtcgccgtgaacgttctttttcgcaacgggtttgccgccagaacacaggtaagtgccgtgtgtggttcccgcgggcctggcctctttacgggttatggcccttgcgtgccttgaattacttccacctggctgcagtacgtgattcttgatcccgagcttcgggttggaagtgggtgggagagttcgaggccttgcgcttaaggagccccttcgcctcgtgcttgagttgaggcctggcctgggcgctggggccgccgcgtgcgaatctggtggcaccttcgcgcctgtctcgctgctttcgataagtctctagccatttaaaatttttgatgacctgctgcgacgctttttttctggcaagatagtcttgtaaatgcgggccaagatctgcacactggtatttcggtttttggggccgcgggcggcgacggggcccgtgcgtcccagcgcacatgttcggcgaggcggggcctgcgagcgcggccaccgagaatcggacgggggtagtctcaagctggccggcctgctctggtgcctggcctcgcgccgccgtgtatcgccccgccctgggcggcaaggctggcccggtcggcaccagttgcgtgagcggaaagatggccgcttcccggccctgctgcagggagctcaaaatggaggacgcggcgctcgggagagcgggcgggtgagtcacccacacaaaggaaaagggcctttccgtcctcagccgtcgcttcatgtgactccactgagtaccgggcgccgtccaggcacctcgattagttctcgagcttttggagtacgtcgtctttaggttggggggaggggttttatgcgatggagtttccccacactgagtgggtggagactgaagttaggccagcttggcacttgatgtaattctccttggaatttgccctttttgagtttggatcttggttcattctcaagcctcagacagtggttcaaagtttttttcttccatttcaggtgtcgtga

SEQ ID NO: 210484 - DNA, 521 bp, Artificial Sequence
  Description of Artificial Sequence: Synthetic Promoter sequence
acccctctctccagccactaagccagttgctccctcggctgacggctgcacgcgaggcctccgaacgtcttacgccttgtggcgcgcccgtccttgtcccgggtgtgatggcggggtgtggggcggagggcgtggcggggaagggccggcgacgagagccgcgcgggacgactcgtcggcgataaccggtgtcgggtagcgccagccgcgcgacggtaacgagggaccgcgacaggcagacgctcccatgatcactctgcacgccgaaggcaaatagtgcaggccgtgcggcgcttggcgttccttggaagggctgaatccccgcctcgtccttcgcagcggccccccgggtgttcccatcgccgcttctaggcccactgcgacgcttgcctgcacttcttacacgctctgggtcccagccgcggcgacgcaaagggccttggtgcgggtctcgtcggcgcagggacgcgtttgggtcccgacggaaccttttccgcgttggggttggggcaccataagct

SEQ ID NO: 210485 - DNA, 118 bp, Artificial Sequence
  Description of Artificial Sequence: Synthetic Promoter sequence
acccctctctccagccactaagccagttgctccctcggctgacggctgcacgcgaggcctccgaacgtcttacgccttgtggcgcgcccgtccttgtcccgggtgtgatggcggggtg

SEQ ID NO: 210486 - DNA, 221 bp, Artificial Sequence
  Description of Artificial Sequence: Synthetic Promoter sequence
acccctctctccagccactaagccagttgctccctcggctgacggctgcacgcgaggcctccgaacgtcttacgccttgtggcgcgcccgtccttgtcccgggtgtgatggcggggtgtggggcggagggcgtggcggggaagggccggcgacgagagccgcgcgggacgactcgtcggcgataaccggtgtcgggtagcgccagccgcgcgacggtaacg

SEQ ID NO: 210487 - DNA, 324 bp, Artificial Sequence
  Description of Artificial Sequence: Synthetic Promoter sequence
acccctctctccagccactaagccagttgctccctcggctgacggctgcacgcgaggcctccgaacgtcttacgccttgtggcgcgcccgtccttgtcccgggtgtgatggcggggtgtggggcggagggcgtggcggggaagggccggcgacgagagccgcgcgggacgactcgtcggcgataaccggtgtcgggtagcgccagccgcgcgacggtaacgagggaccgcgacaggcagacgctcccatgatcactctgcacgccgaaggcaaatagtgcaggccgtgcggcgcttggcgttccttggaagggctgaatccccg

SEQ ID NO: 210488 - DNA, 422 bp, Artificial Sequence
  Description of Artificial Sequence: Synthetic Promoter sequence
acccctctctccagccactaagccagttgctccctcggctgacggctgcacgcgaggcctccgaacgtcttacgccttgtggcgcgcccgtccttgtcccgggtgtgatggcggggtgtggggcggagggcgtggcggggaagggccggcgacgagagccgcgcgggacgactcgtcggcgataaccggtgtcgggtagcgccagccgcgcgacggtaacgagggaccgcgacaggcagacgctcccatgatcactctgcacgccgaaggcaaatagtgcaggccgtgcggcgcttggcgttccttggaagggctgaatccccgcctcgtccttcgcagcggccccccgggtgttcccatcgccgcttctaggcccactgcgacgcttgcctgcacttcttacacgctctgggtcccagccg

SEQ ID NO: 210489 - DNA, 512 bp, Artificial Sequence
  Description of Artificial Sequence: Synthetic Promoter sequence
atcgatgggtaggggaggcgcttttcccaaggcagtctggagcatgcgctttagcagccccgctgggcacttggcgctacacaagtggcctctggcctcgcacacattccacatccaccggtaggcgccaaccggctccgttctttggtggccccttcgcgccaccttctactcctcccctagtcaggaagttcccccccgccccgcagctcgcgtcgtgcaggacgtgacaaatggaagtagcacgtctcactagtctcgtgcagatggacagcaccgctgagcaatggaagcgggtaggcctttggggcagcggccaatagcagctttgctccttcgctttctgggctcagaggctgggaaggggtgggtccgggggcgggctcaggggcgggctcaggggcggggcgggcgcccgaaggtcctccggaggcccggcattctgcacgcttcaaaagcgcacgtctgccgcgctgttctcctcttcctcatctccgggcctttcgctcgag

SEQ ID NO: 210490 - DNA, 507 bp, Artificial Sequence
  Description of Artificial Sequence: Synthetic Promoter sequence
atcgatgggtaggggaggcgcttttcccaaggcagtctggagcatgcgctttagcagccccgctgggcacttggcgctacacaagtggcctctggcctcgcacacattccacatccaccggtaggcgccaaccggctccgttctttggtggccccttcgcgccaccttctactcctcccctagtcaggaagttcccccccgccccgcagctcgcgtcgtgcaggacgtgacaaatggaagtagcacgtctcactagtctcgtgcagatggacagcaccgctgagcaatggaagcgggtaggcctttggggcagcggccaatagcagctttgctccttcgctttctgggctcagaggctgggaaggggtgggtccgggggcgggctcaggggcgggctcaggggcggggcgggcgcccgaaggtcctccggaggcccggcattctgcacgcttcaaaagcgcacgtctgccgcgctgttctcctcttcctcatctccgggcctttcgc

SEQ ID NO: 210491 - DNA, 399 bp, Artificial Sequence
  Description of Artificial Sequence: Synthetic Promoter sequence
ccggtaggcgccaaccggctccgttctttggtggccccttcgcgccaccttctactcctcccctagtcaggaagttcccccccgccccgcagctcgcgtcgtgcaggacgtgacaaatggaagtagcacgtctcactagtctcgtgcagatggacagcaccgctgagcaatggaagcgggtaggcctttggggcagcggccaatagcagctttgctccttcgctttctgggctcagaggctgggaaggggtgggtccgggggcgggctcaggggcgggctcaggggcggggcgggcgcccgaaggtcctccggaggcccggcattctgcacgcttcaaaagcgcacgtctgccgcgctgttctcctcttcctcatctccgggcctttcgacctgcagcc

SEQ ID NO: 210492 - protein, 259 aa, Artificial Sequence
  Description of Artificial Sequence: Synthetic Destabilizing Domain (DD)
SHHWGYGKHNGPEHWHKDFPIAKGERQSPVDIDTHTAKYDPSLKPLSVSYDQATSLRILNNGHAFNVEFDDSQDKAVLKGGPLDGTYRLIQFHFHWGSLDGQGSEHTVDKKKYAAELHLVHWNTKYGDFGKAVQQPDGLAVLGIFLKVGSAKPGLQKVVDVLDSIKTKGKSADFTNFDPRGLLPESLDYWTYPGSLTTPPLLECVTWIVLKEPISVSSEQVLKFRKLNFNGEGEPEELMVDNWRPAQPLKNRQIKASFK

SEQ ID NO: 210493 - DNA, 777 bp, Artificial Sequence
  Description of Artificial Sequence: Synthetic Destabilizing Domain (DD)
tcccatcactgggggtacggcaaacacaacggacctgagcactggcataaggacttccccattgccaagggagagcgccagtcccctgttgacatcgacactcatacagccaagtatgacccttccctgaagcccctgtctgtttcctatgatcaagcaacttccctgaggatcctcaacaatggtcatgctttcaacgtggagtttgatgactctcaggacaaagcagtgctcaagggaggacccctggatggcacttacagattgattcagtttcactttcactggggttcacttgatggacaaggttcagagcatactgtggataaaaagaaatatgctgcagaacttcacttggttcactggaacaccaaatatggggattttgggaaagctgtgcagcaacctgatggactggccgttctaggtatttttttgaaggttggcagcgctaaaccgggccttcagaaagttgttgatgtgctggattccattaaaacaaagggcaagagtgctgacttcactaacttcgatcctcgtggcctccttcctgaatccctggattactggacctacccaggctcactgaccacccctcctcttctggaatgtgtgacctggattgtgctcaaggaacccatcagcgtcagcagcgagcaggtgttgaaattccgtaaacttaacttcaatggggagggtgaacccgaagaactgatggtggacaactggcgcccagctcagccactgaagaacaggcaaatcaaagcttccttcaaa

SEQ ID NO: 210494 - protein, 259 aa, Artificial Sequence
  Description of Artificial Sequence: Synthetic Destabilizing Domain (DD)
SHHWGYGKHNGPEHWHKDFPIAKGERQSPVDIDTHTAKYDPSLKPLSVSYDQATSLRILNNGHAFNVEFDDSQDKAVLKGGPLDGTYRLIQFHFHWGSLDGQGSEHTVDKKKYAAELHLVHWNTKYGDFGKAVQQPDGLAVLGIFLKVGSAKPGLQKVVDVLDSIKTKGKSADFTNFDPRGLLPESLDYWTYPGSLTTPPLLECVTSIVLKEPISVSSEQVLKFRKLNFNGEGEPEELMVDNWRPAQPLKNRQIKASFK

SEQ ID NO: 210495 - DNA, 777 bp, Artificial Sequence
  Description of Artificial Sequence: Synthetic Destabilizing Domain (DD)
tcccatcactgggggtacggcaaacacaacggacctgagcactggcataaggacttccccattgccaagggagagcgccagtcccctgttgacatcgacactcatacagccaagtatgacccttccctgaagcccctgtctgtttcctatgatcaagcaacttccctgaggatcctcaacaatggtcatgctttcaacgtggagtttgatgactctcaggacaaagcagtgctcaagggaggacccctggatggcacttacagattgattcagtttcactttcactggggttcacttgatggacaaggttcagagcatactgtggataaaaagaaatatgctgcagaacttcacttggttcactggaacaccaaatatggggattttgggaaagctgtgcagcaacctgatggactggccgttctaggtatttttttgaaggttggcagcgctaaaccgggccttcagaaagttgttgatgtgctggattccattaaaacaaagggcaagagtgctgacttcactaacttcgatcctcgtggcctccttcctgaatccctggattactggacctacccaggctcactgaccacccctcctcttctggaatgtgtgaccagcattgtgctcaaggaacccatcagcgtcagcagcgagcaggtgttgaaattccgtaaacttaacttcaatggggagggtgaacccgaagaactgatggtggacaactggcgcccagctcagccactgaagaacaggcaaatcaaagcttccttcaaa

SEQ ID NO: 210496 - protein, 259 aa, Artificial Sequence
  Description of Artificial Sequence: Synthetic Destabilizing Domain (DD)
SHHWGYGKHNGPEHWHKDFPIAKGERQSPVDIDTHTAKYDPSLKPLSVSNDQATSLRILNNGHAFNVEFDDSQDKAVLKGGPLDGTYRLIQFHFHWGSLDGQGSEHTVDKKKYAAELHLVHWNTKYGDFGKAVQQPDGLAVLGIFLKVGSAKPGLQKVVDVLDSIKTKGKSADFTNFDPRGLLPESLDYWTYPGSLTTPPLLECVTWIVLKEPISVSSEQVLKFRKLNFNGEGEPEELMVDNWRPAQPLKNRQIKASFK

SEQ ID NO: 210497 - DNA, 777 bp, Artificial Sequence
  Description of Artificial Sequence: Synthetic Destabilizing Domain (DD)
tcccatcactgggggtacggcaaacacaacggacctgagcactggcataaggacttccccattgccaagggagagcgccagtcccctgttgacatcgacactcatacagccaagtatgacccttccctgaagcccctgtctgtttccaatgatcaagcaacttccctgaggatcctcaacaatggtcatgctttcaacgtggagtttgatgactctcaggacaaagcagtgctcaagggaggacccctggatggcacttacagattgattcagtttcactttcactggggttcacttgatggacaaggttcagagcatactgtggataaaaagaaatatgctgcagaacttcacttggttcactggaacaccaaatatggggattttgggaaagctgtgcagcaacctgatggactggccgttctaggtatttttttgaaggttggcagcgctaaaccgggccttcagaaagttgttgatgtgctggattccattaaaacaaagggcaagagtgctgacttcactaacttcgatcctcgtggcctccttcctgaatccctggattactggacctacccaggctcactgaccacccctcctcttctggaatgtgtgacctggattgtgctcaaggaacccatcagcgtcagcagcgagcaggtgttgaaattccgtaaacttaacttcaatggggagggtgaacccgaagaactgatggtggacaactggcgcccagctcagccactgaagaacaggcaaatcaaagcttccttcaaa

SEQ ID NO: 210498 - protein, 259 aa, Artificial Sequence
  Description of Artificial Sequence: Synthetic Destabilizing Domain (DD)
SHHWGYGKHNGPEHWHKDFPIAKGERQSPVDIDTHTAKYDPSLKPLSVSYDQATNLRILNNGHAFNVEFDDSQDKAVLKGGPLDGTYRLIQFHFHWGSLDGQGSEHTVDKKKYAAELHLVHWNTKYGDFGKAVQQPDGLAVLGIFLKVGSAKPGLQKVVDVLDSIKTKGKSADFTNFDPRGLLPESLDYWTYPGSLTTPPLLECVTWIVLKEPISVSSEQVLKFRKLNFNGEGEPEELMVDNWRPAQPLKNRQIKASFK

SEQ ID NO: 210499 - DNA, 777 bp, Artificial Sequence
  Description of Artificial Sequence: Synthetic Destabilizing Domain (DD)
tcccatcactgggggtacggcaaacacaacggacctgagcactggcataaggacttccccattgccaagggagagcgccagtcccctgttgacatcgacactcatacagccaagtatgacccttccctgaagcccctgtctgtttcctatgatcaagcaactaatctgaggatcctcaacaatggtcatgctttcaacgtggagtttgatgactctcaggacaaagcagtgctcaagggaggacccctggatggcacttacagattgattcagtttcactttcactggggttcacttgatggacaaggttcagagcatactgtggataaaaagaaatatgctgcagaacttcacttggttcactggaacaccaaatatggggattttgggaaagctgtgcagcaacctgatggactggccgttctaggtatttttttgaaggttggcagcgctaaaccgggccttcagaaagttgttgatgtgctggattccattaaaacaaagggcaagagtgctgacttcactaacttcgatcctcgtggcctccttcctgaatccctggattactggacctacccaggctcactgaccacccctcctcttctggaatgtgtgacctggattgtgctcaaggaacccatcagcgtcagcagcgagcaggtgttgaaattccgtaaacttaacttcaatggggagggtgaacccgaagaactgatggtggacaactggcgcccagctcagccactgaagaacaggcaaatcaaagcttccttcaaa

SEQ ID NO: 210500 - protein, 259 aa, Artificial Sequence
  Description of Artificial Sequence: Synthetic Destabilizing Domain (DD)
SHHWGYGKHNGPEHWHKDFPIAKGERQSPVDIDTHTAKYDPSLKPLSVSTDQATSLRILNNGHAFNVEFDDSQDKAVLKGGPLDGTYRLIQFHFHWGSLDGQGSEHTVDKKKYAAELHLVHWNTKYGDFGKAVQQPDGLAVLGIFLKVGSAKPGLQKVVDVLDSIKTKGKSADFTNFDPRGLLPESLDYWTYPGSLTTPPLLECVTWIVLKEPISVSSEQVLKFRKLNFNGEGEPEELMVDNWRPAQPLKNRQIKASFK

SEQ ID NO: 210501 - DNA, 777 bp, Artificial Sequence
  Description of Artificial Sequence: Synthetic Destabilizing Domain (DD)
tcccatcactgggggtacggcaaacacaacggacctgagcactggcataaggacttccccattgccaagggagagcgccagtcccctgttgacatcgacactcatacagccaagtatgacccttccctgaagcccctgtctgtttccactgatcaagcaacttccctgaggatcctcaacaatggtcatgctttcaacgtggagtttgatgactctcaggacaaagcagtgctcaagggaggacccctggatggcacttacagattgattcagtttcactttcactggggttcacttgatggacaaggttcagagcatactgtggataaaaagaaatatgctgcagaacttcacttggttcactggaacaccaaatatggggattttgggaaagctgtgcagcaacctgatggactggccgttctaggtatttttttgaaggttggcagcgctaaaccgggccttcagaaagttgttgatgtgctggactccattaaaacaaagggcaagagtgctgacttcactaacttcgatcctcgtggcctccttcctgaatccctggattactggacctacccaggctcactgaccacccctcctcttctggaatgtgtgacctggattgtgctcaaggaacccatcagcgtcagcagcgagcaggtgttgaaattccgtaaacttaacttcaatggggagggtgaacccgaagaactgatggtggacaactggcgcccagctcagccactgaagaacaggcaaatcaaagcttccttcaaa

SEQ ID NO: 210502 - DNA, 777 bp, Artificial Sequence
  Description of Artificial Sequence: Synthetic Destabilizing Domain (DD)
tcccatcactgggggtacggcaaacacaacggacctgagcactggcataaggacttccccattgccaagggagagcgccagtcccctgttgacatcgacactcatacagccaagtatgacccttccctgaagcccctgtctgtttccactgatcaagcaacttccctgaggatcctcaacaatggtcatgctttcaacgtggagtttgatgactctcaggacaaagcagtgctcaagggaggacccctggatggcacttacagattgattcagtttcactttcactggggttcacttgatggacaaggttcagagcatactgtggataaaaagaaatatgctgcagaacttcacttggttcactggaacaccaaatatggggattttgggaaagctgtgcagcaacctgatggactggccgttctaggtatttttttgaaggttggcagcgctaaaccgggccttcagaaagttgttgatgtgctggattccattaaaacaaagggcaagagtgctgacttcactaacttcgatcctcgtggcctccttcctgaatccctggattactggacctacccaggctcactgaccacccctcctcttctggaatgtgtgacctggattgtgctcaaggaacccatcagcgtcagcagcgagcaggtgttgaaattccgtaaacttaacttcaatggggagggtgaacccgaagaactgatggtggacaactggcgcccagctcagccactgaagaacaggcaaatcaaagcttccttcaaa

SEQ ID NO: 210503 - protein, 259 aa, Artificial Sequence
  Description of Artificial Sequence: Synthetic Destabilizing Domain (DD)
SHHWGYGKHNGPEHWHKDFPIAKGERQSPVDIDTHTAKYDPSLKPLSVSYDQATSLRILNNGHAFNVEFDFSQDKAVLKGGPLDGTYRLIQFHFHWGSLDGQGSEHTVDKKKYAAELHLVHWNTKYGDFGKAVQQPDGLAVLGIFLKVGSAKPGLQKVVDVLDSIKTKGKSADFTNFDPRGLLPESLDYWTYPGSLTTPPLLECVTWIVLKEPISVSSEQVLKFRKLNFNGEGEPEELMFDNWRPAQLLKNRQIKASFK

SEQ ID NO: 210504 - DNA, 777 bp, Artificial Sequence
  Description of Artificial Sequence: Synthetic Destabilizing Domain (DD)
tcccatcactgggggtacggcaaacacaacggacctgagcactggcataaggacttccccattgccaagggagagcgccagtcccctgttgacatcgacactcatacagccaagtatgacccttccctgaagcccctgtctgtttcctatgatcaagcaacttccctgaggatcctcaacaatggtcatgctttcaacgtggagtttgatttttctcaggacaaagcagtgctcaagggaggacccctggatggcacttacagattgattcagtttcactttcactggggttcacttgatggacaaggttcagagcatactgtggataaaaagaaatatgctgcagaacttcacttggttcactggaacaccaaatatggggattttgggaaagctgtgcagcaacctgatggactggccgttctaggtatttttttgaaggttggcagcgctaaaccgggccttcagaaagttgttgatgtgctggattccattaaaacaaagggcaagagtgctgacttcactaacttcgatcctcgtggcctccttcctgaatccctggattactggacctacccaggctcactgaccacccctcctcttctggaatgtgtgacctggattgtgctcaaggaacccatcagcgtcagcagcgagcaggtgttgaaattccgtaaacttaacttcaatggggagggtgaacccgaagaactgatgtttgacaactggcgcccagctcagttgctgaagaacaggcaaatcaaagcttccttcaaa

SEQ ID NO: 210505 - protein, 259 aa, Artificial Sequence
  Description of Artificial Sequence: Synthetic Destabilizing Domain (DD)
SHHWGYGKHNGPEHWHKDFPIAKGERQSPVDIDTHTAKYDPSLKPLSVSYDQATSLRILNNGHAFNVEFFDSQDKAVLKGGPLDGTYRLIQFHFHWGSLDGQGSEHTVDKKKYAAELHLVHWNTKYGDFGKAVQQPDGLAVLGIFLKVGSAKPGLQKVVDVLDSIKTKGKSADFTNFDPRGLLPESLDYWTYPGSLTTPPLLECVTWIVLKEPISVSSEQVLKFRKLNFFGEGEPEELMVDNWRPAQPLKNRQIKASFK

SEQ ID NO: 210506 - DNA, 777 bp, Artificial Sequence
  Description of Artificial Sequence: Synthetic Destabilizing Domain (DD)
tcccatcactgggggtacggcaaacacaacggacctgagcactggcataaggacttccccattgccaagggagagcgccagtcccctgttgacatcgacactcatacagccaagtatgacccttccctgaagcccctgtctgtttcctatgatcaagcaacttccctgaggatcctcaacaatggtcatgctttcaacgtggagttttttgactctcaggacaaagcagtgctcaagggaggacccctggatggcacttacagattgattcagtttcactttcactggggttcacttgatggacaaggttcagagcatactgtggataaaaagaaatatgctgcagaacttcacttggttcactggaacaccaaatatggggattttgggaaagctgtgcagcaacctgatggactggccgttctaggtatttttttgaaggttggcagcgctaaaccgggccttcagaaagttgttgatgtgctggattccattaaaacaaagggcaagagtgctgacttcactaacttcgatcctcgtggcctccttcctgaatccctggattactggacctacccaggctcactgaccacccctcctcttctggaatgtgtgacctggattgtgctcaaggaacccatcagcgtcagcagcgagcaggtgttgaaattccgtaaacttaacttctttggggagggtgaacccgaagaactgatggtggacaactggcgcccagctcagccactgaagaacaggcaaatcaaagcttccttcaaa

SEQ ID NO: 210507 - protein, 259 aa, Artificial Sequence
  Description of Artificial Sequence: Synthetic Destabilizing Domain (DD)
SHHWGYGKHNGPEHWHKDFPIAKGERQSPVDIDTHTAKYDPSLKPLSVSYDQATFLRILNNGHAFNVEFDDSQDKAVLKGGPLDGTYRLIQFHFHWGSLDGQGSEHTVDKKKYAAELHLVHWNTKYGDFGKAVQQPDGLAVLGIFLKVGSAKPGLQKVVDVLDSIKTKGKSADFTNFDPRGLLPESLDYWTYPGSLTTPPLLECVTWIVLKEPISVSSEQVLKFRKLNFNGEGEPEELMVDNWRPAQPLKNRQIKASFK

SEQ ID NO: 210508 - DNA, 777 bp, Artificial Sequence
  Description of Artificial Sequence: Synthetic Destabilizing Domain (DD)
tcccatcactgggggtacggcaaacacaacggacctgagcactggcataaggacttccccattgccaagggagagcgccagtcccctgttgacatcgacactcatacagccaagtatgacccttccctgaagcccctgtctgtttcctatgatcaagcaacttttctgaggatcctcaacaatggtcatgctttcaacgtggagtttgatgactctcaggacaaagcagtgctcaagggaggacccctggatggcacttacagattgattcagtttcactttcactggggttcacttgatggacaaggttcagagcatactgtggataaaaagaaatatgctgcagaacttcacttggttcactggaacaccaaatatggggattttgggaaagctgtgcagcaacctgatggactggccgttctaggtatttttttgaaggttggcagcgctaaaccgggccttcagaaagttgttgatgtgctggattccattaaaacaaagggcaagagtgctgacttcactaacttcgatcctcgtggcctccttcctgaatccctggattactggacctacccaggctcactgaccacccctcctcttctggaatgtgtgacctggattgtgctcaaggaacccatcagcgtcagcagcgagcaggtgttgaaattccgtaaacttaacttcaatggggagggtgaacccgaagaactgatggtggacaactggcgcccagctcagccactgaagaacaggcaaatcaaagcttccttcaaa

SEQ ID NO: 210509 - DNA, 777 bp, Artificial Sequence
  Description of Artificial Sequence: Synthetic Destabilizing Domain (DD)
tcccatcactgggggtacggcaaacacaacggacctgagcactggcataaggacttccccattgccaagggagagcgccagtcccctgttgacatcgacactcatacagccaagtatgacccttccctgaagcccctgtctgtttcctatgatcaagcaacttttctaaggatcctcaacaatggtcatgctttcaacgtggagtttgatgactctcaggacaaagcagtgctcaagggaggacccctggatggcacttacagattgattcagtttcactttcactggggttcacttgatggacaaggttcagagcatactgtggataaaaagaaatatgctgcagaacttcacttggttcactggaacaccaaatatggggattttgggaaagctgtgcagcaacctgatggactggccgttctaggtatttttttgaaggttggcagcgctaaaccgggccttcagaaagttgttgatgtgctggattccattaaaacaaagggcaagagtgctgacttcactaacttcgatcctcgtggcctccttcctgaatccctggattactggacctacccaggctcactgaccacccctcctcttctggaatgtgtgacctggattgtgctcaaggaacccatcagcgtcagcagcgagcaggtgttgaaattccgtaaacttaacttcaatggggagggtgaacccgaagaactgatggtggacaactggcgcccagctcagccactgaagaacaggcaaatcaaagcttccttcaaa

SEQ ID NO: 210510 - protein, 259 aa, Artificial Sequence
  Description of Artificial Sequence: Synthetic Destabilizing Domain (DD)
SHHWGYGKHNGPEHWHKDFPIAKGERQSPVDIDTHTAKYDPSLKPLSVSYDQATSLRILNNGHAFNVEFLDSQDKAVLKGGPLDGNYRLIQFHFHWGSLDGQGSEHTVDKKKYAAELHLVHWNTKYGDFGKAVQQPDGLAVLGIFLKVGSAKPGLQKVVDVLDSIKTKGKSADFTNFDPRGLLPESLDYWTYPGSLTTPPLLECVTWIVLKEPISVSSEQVLKFRKLNFNGEGEPEELMVDNWRPAQPRKNRQIKASFK

SEQ ID NO: 210511 - DNA, 777 bp, Artificial Sequence
  Description of Artificial Sequence: Synthetic Destabilizing Domain (DD)
tcccatcactgggggtacggcaaacacaacggacctgagcactggcataaggacttccccattgccaagggagagcgccagtcccctgttgacatcgacactcatacagccaagtatgacccttccctgaagcccctgtctgtttcctatgatcaagcaacttccctgaggatcctcaacaatggtcatgctttcaacgtggagtttttggactctcaggacaaagcagtgctcaagggaggacccctggatggcaattacagattgattcagtttcactttcactggggttcacttgatggacaaggttcagagcatactgtggataaaaagaaatatgctgcagaacttcacttggttcactggaacaccaaatatggggattttgggaaagctgtgcagcaacctgatggactggccgttctaggtatttttttgaaggttggcagcgctaaaccgggccttcagaaagttgttgatgtgctggattccattaaaacaaagggcaagagtgctgacttcactaacttcgatcctcgtggcctccttcctgaatccctggattactggacctacccaggctcactgaccacccctcctcttctggaatgtgtgacctggattgtgctcaaggaacccatcagcgtcagcagcgagcaggtgttgaaattccgtaaacttaacttcaatggggagggtgaacccgaagaactgatggtggacaactggcgcccagctcagccacggaagaacaggcaaatcaaagcttccttcaaa

SEQ ID NO: 210512 - protein, 259 aa, Artificial Sequence
  Description of Artificial Sequence: Synthetic Destabilizing Domain (DD)
SHHWGYGKHNGPEHWHKDFPIAKGERQSPVDIDTHTAKYDPSLKPLSVSYDQATSLRILNNGHAFNVEFDDSQDKAVLKGGPLDGTYRLIQFHFHWGSLDGQGSEHTVDKKKYAAELHLVHWNTKYGDFGKAVQQPDGLAVLGIFLKVGSAKPGLQKVVDVLDSIKTKGKSADFTNFDPRGSLPESLDYWTYPGSLTTPPLLECVTWIVLKEPISVSSEQVLKFRKLNFNGEGEPEELMVDNWRPAQPLKNRQIKASFK

SEQ ID NO: 210513 - DNA, 777 bp, Artificial Sequence
  Description of Artificial Sequence: Synthetic Destabilizing Domain (DD)
tcccatcactgggggtacggcaaacacaacggacctgagcactggcataaggacttccccattgccaagggagagcgccagtcccctgttgacatcgacactcatacagccaagtatgacccttccctgaagcccctgtctgtttcctatgatcaagcaacttccctgaggatcctcaacaatggtcatgctttcaacgtggagtttgatgactctcaggacaaagcagtgctcaagggaggacccctggatggcacttacagattgattcagtttcactttcactggggttcacttgatggacaaggttcagagcatactgtggataaaaagaaatatgctgcagaacttcacttggttcactggaacaccaaatatggggattttgggaaagctgtgcagcaacctgatggactggccgttctaggtatttttttgaaggttggcagcgctaaaccgggccttcagaaagttgttgatgtgctggattccattaaaacaaagggcaagagtgctgacttcactaacttcgatcctcgtggcagtcttcctgaatccctggattactggacctacccaggctcactgaccacccctcctcttctggaatgtgtgacctggattgtgctcaaggaacccatcagcgtcagcagcgagcaggtgttgaaattccgtaaacttaacttcaatggggagggtgaacccgaagaactgatggtggacaactggcgcccagctcagccactgaagaacaggcaaatcaaagcttccttcaaa

SEQ ID NO: 210514 - protein, 259 aa, Artificial Sequence
  Description of Artificial Sequence: Synthetic Destabilizing Domain (DD)
SHHWGYGKHNGPEHWHKDFPIAKGERQSPVDIDTHTAKYDPSLKPLSVSYDQATSLRILNNGHAFNVEFDDSQDKIVLKGGPLDGTYRLIQFHFHWGSLDGQGSEHTVDKKKYAAELHLVHWNTKYGDFGKAVQQPDGLAVLGIFLKVGSAKPGLQKVVDVLDSIKTKGKSADFTNFDPRGLLPESLDYWTYPGSLTTPPLLECVTWIVLKEPISVSSEQVLKFRKLNFNGEGEPEELMVDNWRPAQFLKNRQIKASFK

SEQ ID NO: 210515 - DNA, 777 bp, Artificial Sequence
  Description of Artificial Sequence: Synthetic Destabilizing Domain (DD)
tcccatcactgggggtacggcaaacacaacggacctgagcactggcataaggacttccccattgccaagggagagcgccagtcccctgttgacatcgacactcatacagccaagtatgacccttccctgaagcccctgtctgtttcctatgatcaagcaacttccctgaggatcctcaacaatggtcatgctttcaacgtggagtttgatgactctcaggacaaaattgtgctcaagggaggacccctggatggcacttacagattgattcagtttcactttcactggggttcacttgatggacaaggttcagagcatactgtggataaaaagaaatatgctgcagaacttcacttggttcactggaacaccaaatatggggattttgggaaagctgtgcagcaacctgatggactggccgttctaggtatttttttgaaggttggcagcgctaaaccgggccttcagaaagttgttgatgtgctggattccattaaaacaaagggcaagagtgctgacttcactaacttcgatcctcgtggcctccttcctgaatccctggattactggacctacccaggctcactgaccacccctcctcttctggaatgtgtgacctggattgtgctcaaggaacccatcagcgtcagcagcgagcaggtgttgaaatttcgtaaacttaacttcaatggggagggtgaacccgaagaactgatggtggacaactggcgcccagctcagtttctgaagaacaggcaaatcaaagcttccttcaaa

SEQ ID NO: 210516 - protein, 259 aa, Artificial Sequence
  Description of Artificial Sequence: Synthetic Destabilizing Domain (DD)
SHHWGYGKHNGPEHWHKDFPIAKGERQSPVDIDTHTAKYDPSLKPLSVSYDQATSLRILNNGHAFNVEFKDSQDKAVLKGGPLDGTYRLIQFHFHWGSLDGQGSEHTVDKKKYAAELHLVHWNTKYGDFGKAVQQPDGLAVLGIFLKVGSAKPGLQKVVDVLDSIKTKGKSADFTNFDPRGLLPESLDYWTYPGSLTTPPLLECVTWIVLKEPISVSSEQVLKFRKLNFNGEGEPEELMVDNWRPAQHLKNRQIKASFK

SEQ ID NO: 210517 - DNA, 777 bp, Artificial Sequence
  Description of Artificial Sequence: Synthetic Destabilizing Domain (DD)
tcccatcactgggggtacggcaaacacaacggacctgagcactggcataaggacttccccattgccaagggagagcgccagtcccctgttgacatcgacactcatacagccaagtatgacccttccctgaagcccctgtctgtttcctatgatcaagcaacttccctgaggatcctcaacaatggtcatgctttcaacgtggagtttaaggactctcaggacaaagcagtgctcaagggaggacccctggatggcacttacagattgattcagtttcactttcactggggttcacttgatggacaaggttcagagcatactgtggataaaaagaaatatgctgcagaacttcacttggttcactggaacaccaaatatggggattttgggaaagctgtgcagcaacctgatggactggccgttctaggtatttttttgaaggttggcagcgctaaaccgggccttcagaaagttgttgatgtgctggattccattaaaacaaagggcaagagtgctgacttcactaacttcgatcctcgtggcctccttcctgaatccctggattactggacctacccaggctcactgaccacccctcctcttctggaatgtgtgacctggattgtgctcaaggaacccatcagcgtcagcagcgagcaggtgttgaaattccgtaaacttaacttcaatggggagggtgaacccgaagaactgatggtggacaactggcgcccagctcagcatctgaagaacaggcaaatcaaagcttccttcaaa

SEQ ID NO: 210518 - protein, 259 aa, Artificial Sequence
  Description of Artificial Sequence: Synthetic Destabilizing Domain (DD)
SHHWGYGKHNGPEHWHKDFPIAKGERQSPVDIDTHTAKYDPSLKPLSVSYDQATSLRILNNGHAFNVEFDFSQDKAVLKGGPLDGTYRLIQFHFHWGSLDGQGSEHTVDKKKYAAELHLVHWNTKYGDFGKAVQQPDGLAVLGIFLKVGSAKPGLQKVVDVLDSIKTKGKSADFTNFDPRGLLPESLDYWTYPGSLTTPPLLECVTWIVLKEPISVSSEQVLKFRKLNFNGEGEPEELMVDNWRPAQFLKNRQIKASFK

SEQ ID NO: 210519 - DNA, 777 bp, Artificial Sequence
  Description of Artificial Sequence: Synthetic Destabilizing Domain (DD)
tcccatcactgggggtacggcaaacacaacggacctgagcactggcataaggacttccccattgccaagggagagcgccagtcccctgttgacatcgacactcatacagccaagtatgacccttccctgaagcccctgtctgtttcctatgatcaagcaacttccctgaggatcctcaacaatggacatgctttcaacgtggagtttgatttttctcaggacaaagcagtgctcaagggaggacccctggatggcacttacagattgattcagtttcactttcactggggttcacttgatggacaaggttcagagcatactgtggataaaaagaaatatgctgcagaacttcacttggttcactggaacaccaaatatggggattttgggaaagctgtgcagcaacctgatggactggccgttctaggtatttttttgaaggttggcagcgctaaaccgggccttcagaaagttgttgatgtgctggattccattaaaacaaagggcaagagtgctgacttcactaacttcgatcctcgtggcctccttcctgaatccctggattactggacctacccaggctcactgaccacccctcctcttctggaatgtgtgacctggattgtgctcaaggaacccatcagcgtcagcagcgagcaggtgttgaaattccgtaaacttaacttcaatggggagggtgaacccgaagaactgatggtggacaactggcgcccagctcagtttctgaagaacaggcaaatcaaagcttccttcaaa

SEQ ID NO: 210520 - DNA, 777 bp, Artificial Sequence
  Description of Artificial Sequence: Synthetic Destabilizing Domain (DD)
tcccatcactgggggtacggcaaacacaacggacctgagcactggcataaggacttccccattgccaagggagagcgccagtcccctgttgacatcgacactcatacagccaagtatgacccttccctgaagcccctgtctgtttcctatgatcaagcaacttccctgaggatcctcaacaatggtcatgctttcaacgtggagtttgatttttctcaggacaaagcagtgctcaagggaggacccctggatggcacttacagattgattcagtttcactttcactggggttcacttgatggacaaggttcagagcatactgtggataaaaagaaatatgctgcagaacttcacttggttcactggaacaccaaatatggggattttgggaaagctgtgcagcaacctgatggactggccgttctaggtatttttttgaaggttggcagcgctaaaccgggccttcagaaagttgttgatgtgctggattccattaaaacaaagggcaagagtgctgacttcactaacttcgatcctcgtggcctccttcctgaatccctggattactggacctacccaggctcactgaccacccctcctcttctggaatgtgtgacctggattgtgctcaaggaacccatcagcgtcagcagcgagcaggtgttgaaattccgtaaacttaacttcaatggggagggtgaacccgaagaactgatggtggacaactggcgcccagctcagtttctgaagaacaggcaaatcaaagcttccttcaaa

SEQ ID NO: 210521 - protein, 259 aa, Artificial Sequence
  Description of Artificial Sequence: Synthetic Destabilizing Domain (DD)
SHHWGYGKHNGPEHWHKDFPIAKGERQSPVDIDTHTAKYDPSLKPLSVSYDNATSLRILYNGHAFNVEFDDSQDKAVLKGGPLDGTYRLIQFHFHWGSLDGQGSEHTVDKKKYAAELHLVHWNTKYGDFGKAVQQPDGLAVLGIFLKVGSAKPGLQKVVDVLDSIKTKGKSADFTNFDPRGLLPESLDYWTYPGSLTTPPLLECVTWIVLKEPISVSSEQVLKFRKLNFNGEGEPEELMVDNWRPAQPLKNRQIKASFK

SEQ ID NO: 210522 - DNA, 777 bp, Artificial Sequence
  Description of Artificial Sequence: Synthetic Destabilizing Domain (DD)
tcccatcactgggggtacggcaaacacaacggacctgagcactggcataaggacttccccattgccaagggagagcgccagtcccctgttgacatcgacactcatacagccaagtatgacccttccctgaagcccctgtctgtttcctatgataatgcaacttccctgaggatcctctataatggtcatgctttcaacgtggagtttgatgactctcaggacaaagcagtgctcaagggaggacccctggatggcacttacagattgattcagtttcactttcactggggttcacttgatggacaaggttcagagcatactgtggataaaaagaaatatgctgcagaacttcacttggttcactggaacaccaaatatggggattttgggaaagctgtgcagcaacctgatggactggccgttctaggtatttttttgaaggttggcagcgctaaaccgggccttcagaaagttgttgatgtgctggattccattaaaacaaagggcaagagtgctgacttcactaacttcgatcctcgtggcctccttcctgaatccctggattactggacctacccaggctcactgaccacccctcctcttctggaatgtgtgacctggattgtgctcaaggaacccatcagcgtcagcagcgagcaggtgttgaaattccgtaaacttaacttcaatggggagggtgaacccgaagaactgatggtggacaactggcgcccagctcagccactgaagaacaggcaaatcaaagcttccttcaaa

SEQ ID NO: 210523 - protein, 259 aa, Artificial Sequence
  Description of Artificial Sequence: Synthetic Destabilizing Domain (DD)
SHHWGYGKHNGPEHWHKDFPIAKGERQSPVDIDTHTAKYDPSLKPLSVSYDQATSLRILNNGHAFNVEFDDSQDKAVLKGGPLDGTYRLIQFHFHWGSLDGQGSDHTVDKKKYAAELHLVHWNTKYGDFGKAVQQPDGLAVLGIFLKVGSAKPGLQKVVDVLDSIKTKGKSADFTNFDPRGLLPESLDYWTYPGSLTTPPLLESVTWIVLKEPISVSSEQVLKFRKLNFNGEGEPEELMVDNWRPAQPLKNRQIKASFK

SEQ ID NO: 210524 - DNA, 777 bp, Artificial Sequence
  Description of Artificial Sequence: Synthetic Destabilizing Domain (DD)
tcccatcactgggggtacggcaaacacaacggacctgagcactggcataaggacttccccattgccaagggagagcgccagtcccctgttgacatcgacactcatacagccaagtatgacccttccctgaagcccctgtctgtttcctatgatcaagcaacttccctgagaatcctcaacaatggtcatgctttcaacgtggagtttgatgactctcaggacaaagcagtgctcaagggaggacccctggatggcacttacagattgattcagtttcactttcactggggttcacttgatggacaaggttcagaccatactgtggataaaaagaaatatgctgcagaacttcacttggttcactggaacaccaaatatggggattttgggaaagctgtgcagcaacctgatggactggccgttctaggtatttttttgaaggttggcagcgctaaaccgggccttcagaaagttgttgatgtgctggattccattaaaacaaagggcaagagtgctgacttcactaacttcgatcctcgtggcctccttcctgaatccctggattactggacctacccaggctcactgaccacccctcctcttctggaatctgtgacctggattgtgctcaaggaacccatcagcgtcagcagcgagcaggtgttgaaattccgtaaacttaacttcaatggggagggtgaacccgaagaactgatggtggacaactggcgcccagctcagccactgaagaacaggcaaatcaaagcttccttcaaa

SEQ ID NO: 210525 - protein, 259 aa, Artificial Sequence
  Description of Artificial Sequence: Synthetic Destabilizing Domain (DD)
SHHWGYGKHNGPEHWHKDFPIAKGERQSPVDIDTHTAKYDPSLKPLSVSYDQATSLRILNNGHAFNVEFDDSQDKAVLKGGPLDGTYRLIQFHFHWGSLDGQGSEHTVDKKKYAAELHLVHWNTKYGDFGKAVQQPDGLAVLGIFLKVGSAKPGLQKVVDVLDSIKTKGKSADFTNFDPRGLLPESLDYWTYPGSLTTPPLLESVTSIVLKEPISVSSEQVLKFRKLNFNGEGEPEELMVDNWRPAQPLKNRQIKASFK

SEQ ID NO: 210526 - DNA, 777 bp, Artificial Sequence
  Description of Artificial Sequence: Synthetic Destabilizing Domain (DD)
tcccatcactgggggtacggcaaacacaacggacctgagcactggcataaggacttccccattgccaagggagagcgccagtcccctgttgacatcgacactcatacagccaagtatgacccttccctgaagcccctgtctgtttcctatgatcaagcaacttccctgagaatcctcaacaatggtcatgctttcaacgtggagtttgatgactctcaggacaaagcagtgctcaagggaggacccctggatggcacttacagattgattcagtttcactttcactggggttcacttgatggacaaggttcagagcatactgtggataaaaagaaatatgctgcagaacttcacttggttcactggaacaccaaatatggggattttgggaaagctgtgcagcaacctgatggactggccgttctaggtatttttttgaaggttggcagcgctaaaccgggccttcagaaagttgttgatgtgctggattccattaaaacaaagggcaagagtgctgacttcactaacttcgatcctcgtggcctccttcctgaatccctggattactggacctacccaggctcactgaccacccctcctcttctggaatctgtgaccagcattgtgctcaaggaacccatcagcgtcagcagcgagcaggtgttgaaattccgtaaacttaacttcaatggggagggtgaacccgaagaactgatggtggacaactggcgcccagctcagccactgaagaacaggcaaatcaaagcttccttcaaa

SEQ ID NO: 210527 - protein, 259 aa, Artificial Sequence
  Description of Artificial Sequence: Synthetic Destabilizing Domain (DD)
SHHWGYGKHNGPEHWHKDFPIAKGERQSPVDIDTHTAKYDPSLKPLSVSYDQATSLRILNNGHAFNVEFDDSQDKAVLKGGPLDGTYRLIQFHFHWGSLDGQGSEHTVDKKKYAAELHLVHWNTKYGDFGKAVQQPDGLAVLGIFLKVGSAKPGLQKVVDVLDSIKTKGKSADFTNFDPRGLLPESLDYWTYPGSLTTPPLLESVTWIVLKEPISVSSEQVLKFRKLNFNGEGEPEELMVDNWRPAQPLKNRQIKASFK

SEQ ID NO: 210528 - DNA, 777 bp, Artificial Sequence
  Description of Artificial Sequence: Synthetic Destabilizing Domain (DD)
tcccatcactgggggtacggcaaacacaacggacctgagcactggcataaggacttccccattgccaagggagagcgccagtcccctgttgacatcgacactcatacagccaagtatgacccttccctgaagcccctgtctgtttcctatgatcaagcaacttccctgagaatcctcaacaatggtcatgctttcaacgtggagtttgatgactctcaggacaaagcagtgctcaagggaggacccctggatggcacttacagattgattcagtttcactttcactggggttcacttgatggacaaggttcagagcatactgtggataaaaagaaatatgctgcagaacttcacttggttcactggaacaccaaatatggggattttgggaaagctgtgcagcaacctgatggactggccgttctaggtatttttttgaaggttggcagcgctaaaccgggccttcagaaagttgttgatgtgctggattccattaaaacaaagggcaagagtgctgacttcactaacttcgatcctcgtggcctccttcctgaatccctggattactggacctacccaggctcactgaccacccctcctcttctggaatctgtgacctggattgtgctcaaggaacccatcagcgtcagcagcgagcaggtgttgaaattccgtaaacttaacttcaatggggagggtgaacccgaagaactgatggtggacaactggcgcccagctcagccactgaagaacaggcaaatcaaagcttccttcaaa

SEQ ID NO: 210529 - protein, 259 aa, Artificial Sequence
  Description of Artificial Sequence: Synthetic Destabilizing Domain (DD)
SHHWGYGKHNGPEHWHKDFPIAKGERQSPVDIDTHTAKYDPSLKPLSVSYDQATSLRILNNGHAFNVEFDDSQDKAVLKGGPLDGTYRLIQFHFHWGSLDGQGSEHTVDKKKYAAELHLVHWNTKYGDFGKAVQQPDGLAVLGIFLKVGSAKPGLQKVVDVLDSIKTKGKSADFTNFDPRGLLPESLDYWTIPGSLTTPPLLECVTWIVLKEPISVSSEQVLKFRKLNFNGEGEPEELMVDNWRPAQPLKNRQIKASFK

SEQ ID NO: 210530 - DNA, 777 bp, Artificial Sequence
  Description of Artificial Sequence: Synthetic Destabilizing Domain (DD)
tcccatcactgggggtacggcaaacacaacggacctgagcactggcataaggacttccccattgccaagggagagcgccagtcccctgttgacatcgacactcatacagccaagtatgacccttccctgaagcccctgtctgtttcctatgatcaagcaacttccctgaggatcctcaacaatggtcatgctttcaacgtggagtttgatgactctcaggacaaagcagtgctcaagggaggacccctggatggcacttacagattgattcagtttcactttcactggggttcacttgatggacaaggttcagagcatactgtggataaaaagaaatatgctgcagaacttcacttggttcactggaacaccaaatatggggattttgggaaagctgtgcagcaacctgatggactggccgttctaggtatttttttgaaggttggcagcgctaaaccgggccttcagaaagttgttgatgtgctggattccattaaaacaaagggcaagagtgctgacttcactaacttcgatcctcgtggcctccttcctgaatccctggattactggaccattccaggctcactgaccacccctcctcttctggaatgtgtgacctggattgtgctcaaggaacccatcagcgtcagcagcgagcaggtgttgaaattccgtaaacttaacttcaatggggagggtgaacccgaagaactgatggtggacaactggcgcccagctcagccactgaagaacaggcaaatcaaagcttccttcaaa

SEQ ID NO: 210531 - DNA, 777 bp, Artificial Sequence
  Description of Artificial Sequence: Synthetic Destabilizing Domain (DD)
tcccatcactgggggtacggcaaacacaacggacctgagcactggcataaggacttccccattgccaagggagagcgccagtcccctgttgacatcgacactcatacagccaagtatgacccttccctgaagcccctgtctgtttcctatgatcaagcaacttccctgaggatcctcaacaatggtcatgctttcaacgtggagtttgatgactctcaggacaaagcagtgctcaagggaggacccctggatggcacttacagattgattcagtttcactttcactggggttcacttgatggacaaggttcagagcatactgtggataaaaagaaatatgctgcagaacttcacttggttcactggaacaccaaatatggggattttgggaaagctgtgcagcaacctgatggactggccgttctaggtatttttttgaaggttggcagcgctaaaccgggccttcagaaagttgttgatgtgctggattccattaaaacaaagggcaagagtgctgacttcactaatttcgatcctcgtggcctccttcctgaatccctggattactggaccattccaggctcactgaccacccctcctcttctggaatgtgtgacctggattgtgctcaaggaacccatcagcgtcagcagcgagcaggtgttgaaattccgtaaacttaacttcaatggggagggtgaacccgaagaactgatggtggacaactggcgcccagctcagccactgaagaacaggcaaatcaaagcttccttcaaa

SEQ ID NO: 210532 - protein, 259 aa, Artificial Sequence
  Description of Artificial Sequence: Synthetic Destabilizing Domain (DD)
SHHWGYGKHNGPEHWHKDFPIAKGERQSPVDIDTHTAKYDPSLKPLSVSYDQATSLRILNNGHAFNVEFDDNQDKAVLKGGPLDGTYYLIQFHFHWGSLDGQGSEHTVDKKKYAAELHLVHWNTKYGDFGKAVQQPDGLAVLGIFLKVGSAKPGLQKVVDVLDSIKTKGKSADFTNFDPRGLLPESLDYWTYPGSLTTPPLLECVTWIVLKEPISVSSEQVLKFRKLNFNGEGEPEELMVDNWRPAQPLKNRQIKASFK

SEQ ID NO: 210533 - DNA, 777 bp, Artificial Sequence
  Description of Artificial Sequence: Synthetic Destabilizing Domain (DD)
tcccatcactgggggtacggcaaacacaacggacctgagcactggcataaggacttccccattgccaagggagagcgccagtcccctgttgacatcgacactcatacagccaagtatgacccttccctgaagcccctgtctgtttcctatgatcaagcaacttccctgaggatcctcaacaatggtcatgctttcaacgtggagtttgatgacaatcaggacaaagcagtgctcaagggaggacccctggatggcacttactatttgattcagtttcactttcactggggttcacttgatggacaaggttcagagcatactgtggataaaaagaaatatgctgcagaacttcacttggttcactggaacaccaaatatggggattttgggaaagctgtgcagcaacctgatggactggccgttctaggtatttttttgaaggttggcagcgctaaaccgggccttcagaaagttgttgatgtgctggattccattaaaacaaagggcaagagtgctgacttcactaacttcgatcctcgtggcctccttcctgaatccctggattactggacctacccaggctcactgaccacccctcctcttctggaatgtgtgacctggattgtgctcaaggaacccatcagcgtcagcagcgagcaggtgttgaaattccgtaaacttaacttcaatggggagggtgaacccgaagaactgatggtggacaactggcgcccagctcagccactgaagaacaggcaaatcaaagcttccttcaaa

SEQ ID NO: 210534 - protein, 259 aa, Artificial Sequence
  Description of Artificial Sequence: Synthetic Destabilizing Domain (DD)
SHHWGYGKHNGPEHWHKDFPIAKGERQSPVDIDTHTAKYDPSLKPLSVSYDQATSLRILNNGHAFNVEFKDSQDKAVLKGGPLDGTYRLIQFHFHWGSLDGQGSEHTVDKKKYAAELHLVHWNTKYGDFGKAVQQPDGLAVLGIFLKVGSAKPGLQKVVDVLDSIKTKGKSADFTNFDPRGLLPESLDYWFYPGSLTTPPLLECVTWIVLKEPISVSSEQVLKFRKLNFNGEGEPEELMVDNWRPAQPLKNRQIKASFK

SEQ ID NO: 210535 - DNA, 777 bp, Artificial Sequence
  Description of Artificial Sequence: Synthetic Destabilizing Domain (DD)
tcccatcactgggggtacggcaaacacaacggacctgagcactggcataaggacttccccattgccaagggagagcgccagtcccctgttgacatcgacactcatacagccaagtatgacccttccctgaagcccctgtctgtttcctatgatcaagcaacttccctgaggatcctcaacaatggtcatgctttcaacgtggagtttaaggactctcaggacaaagcagtgctcaagggaggacccctggatggcacttacagattgattcagtttcactttcactggggttcacttgatggacaaggttcagagcatactgtggataaaaagaaatatgctgcagaacttcacttggttcactggaacaccaaatatggggattttgggaaagctgtgcagcaacctgatggactggccgttctaggtatttttttgaaggttggcagcgctaaaccgggccttcagaaagttgttgatgtgctggattccattaaaacaaagggcaagagtgctgacttcactaacttcgatcctcgtggcctccttcctgaatccctggattactggttttacccaggctcactgaccacccctcctcttctggaatgtgtgacctggattgtgctcaaggaacccatcagcgtcagcagcgagcaggtgttgaaattccgtaaacttaacttcaatggggagggtgaacccgaagaactgatggtggacaactggcgcccagctcagccactgaagaacaggcaaatcaaagcttccttcaaa

SEQ ID NO: 210536 - protein, 236 aa, Artificial Sequence
  Description of Artificial Sequence: Synthetic Destabilizing Domain (DD)
SHHWGYGKHNGPEHWHKDFPIAKGERQSPVDIDTHTAKYDPSLKPLSVSYDQATSLRILNNGHAFNVEFDDSQDKAVLKGGPLDGTYRLIQFHFHWGSLDGQGSEHTVDKKKYAAELHLVHWNTKYGDFGKAVQQPDGLAVLGIFLKVGSAKPGLQKVVDVLDSIKTKGKSADFTNFDPRGLLPESLDYWTYPGSLTTPPLLECVTWIVLKEPISVSSEQVLKFRKLNFNGEGEPE

SEQ ID NO: 210537 - DNA, 777 bp, Artificial Sequence
  Description of Artificial Sequence: Synthetic Destabilizing Domain (DD)
tcccatcactgggggtacggcaaacacaacggacctgagcactggcataaggacttccccattgccaagggagagcgccagtcccctgttgacatcgacactcatacagccaagtatgacccttccctgaagcccctgtctgtttcctatgatcaagcaacttccctgaggatcctcaacaatggtcatgctttcaacgtggagtttgatgactctcaggacaaagcagtgctcaagggaggacccctggatggcacttacagattgattcagtttcactttcactggggttcacttgatggacaaggttcagagcatactgtggataaaaagaaatatgctgcagaacttcacttggttcactggaacaccaaatatggggattttgggaaagctgtgcagcaacctgatggactggccgttctaggtatttttttgaaggttggcagcgctaaaccgggccttcagaaagttgttgatgtgctggattccattaaaacaaagggcaagagtgctgacttcactaacttcgatcctcgtggcctccttcctgaatccctggattactggacctacccaggctcactgaccacccctcctcttctggaatgtgtgacctggattgtgctcaaggaacccatcagcgtcagcagcgagcaggtgttgaaattccgtaaacttaacttcaatggggagggtgaacccgaataactgatggtggacaactggcgcccagctcagccactgaagaacaggcaaatcaaagcttccttcaaa

SEQ ID NO: 210538 - protein, 259 aa, Artificial Sequence
  Description of Artificial Sequence: Synthetic Destabilizing Domain (DD)
SHHWGYGKHNGPEHWHKDFPIAKGERQSPVDIDTHTAKYDPSLKPLSVSYDQATSLRILNNGHAFNVEFDDSQDKAVLKGGPLDGTYRLIQFHFHWGSLDGQGSEHTVDKKKYAAELHLVHWNTKYGDFGKAVQQPDGLAVLDIFLKVGSAKPGLQKVVDVLDSIKTKGKSADFTNFDPRGLLPESLDYWTYPGSLTTPPLLECVTWIVLKEPISVSSEQVLKFRKLNFNGEGEPEELMVDNWRPAQPLKNRQIKASFK

SEQ ID NO: 210539 - DNA, 777 bp, Artificial Sequence
  Description of Artificial Sequence: Synthetic Destabilizing Domain (DD)
tcccatcactgggggtacggcaaacacaacggacctgagcactggcataaggacttccccattgccaagggagagcgccagtcccctgttgacatcgacactcatacagccaagtatgacccttccctgaagcccctgtctgtttcctatgatcaagcaacttccctgaggatcctcaacaatggtcatgctttcaacgtggagtttgatgactctcaggacaaagcagtgctcaagggaggacccctggatggcacttacagattgattcagtttcactttcactggggttcacttgatggacaaggttcagagcatactgtggataaaaagaaatatgctgcagaacttcacttggttcactggaacaccaaatatggggattttgggaaagctgtgcagcaacctgatggactggccgttctagatatttttttgaaggttggcagcgctaaaccgggccttcagaaagttgttgatgtgctggattccattaaaacaaagggcaagagtgctgacttcactaacttcgatcctcgtggcctccttcctgaatccctggattactggacctacccaggctcactgaccacccctcctcttctggaatgtgtgacctggattgtgctcaaggaacccatcagcgtcagcagcgagcaggtgttgaaattccgtaaacttaacttcaatggggagggtgaacccgaagaactgatggtggacaactggcgcccagctcagccactgaagaacaggcaaatcaaagcttccttcaaa

SEQ ID NO: 210540 - protein, 259 aa, Artificial Sequence
  Description of Artificial Sequence: Synthetic Destabilizing Domain (DD)
SHHWGYGKHNGPEHWHKDFPIAKGERQSPVDIDTHTAKYDPSLKPLSVSYDQATSLRILNNGHAFNVEFDDSQDKAVLKGGPLDGTYRLIQFHFHWGSLDGQGSEHTVDKKKYAAELHLVHWNTKYGDFGKAVQQPDGLAVLGIFLKVGSAKPGLQKVVDVLDSIKTKGKSADFTNFDPRGLLPESLDYWTLPGSLTTPPLLECVTWIVLKEPISVSSEQVLKFRKLNFNGEGEPEELMVDNWRPAQPLKNRQIKASFL

SEQ ID NO: 210541 - DNA, 777 bp, Artificial Sequence
  Description of Artificial Sequence: Synthetic Destabilizing Domain (DD)
tcccatcactgggggtacggcaaacacaacggacctgagcactggcataaggacttccccattgccaagggagagcgccagtcccctgttgacatcgacactcatacagccaagtatgacccttccctgaagcccctgtctgtttcctatgatcaagcaacttccctgaggatcctcaacaatggtcatgctttcaacgtggagtttgatgactctcaggacaaagcagtgctcaagggaggacccctggatggcacttacagattgattcagtttcactttcactggggttcacttgatggacaaggttcagagcatactgtggataaaaagaaatatgctgcagaacttcacttggttcactggaacaccaaatatggggattttgggaaagctgtgcagcaacctgatggactggccgttctaggtatttttttgaaggttggcagcgctaaaccgggccttcagaaagttgttgatgtgctggattccattaaaacaaagggcaagagtgctgacttcactaacttcgatcctcgtggcctccttcctgaatccctggattactggaccttgccaggctcactgaccacccctcctcttctggaatgtgtgacctggattgtgctcaaggaacccatcagcgtcagcagcgagcaggtgttgaaattccgtaaacttaacttcaatggggagggtgaacccgaagaactgatggtggacaactggcgcccagctcagccactgaagaacaggcaaatcaaagcttccttcttg

SEQ ID NO: 210542 - protein, 259 aa, Artificial Sequence
  Description of Artificial Sequence: Synthetic Destabilizing Domain (DD)
SHHWGYGKHNGPEHWHKDFPIAKGERQSPVDIDTHTAKYDPSLKPLSVSYDQATSLRILNNGHAFNVEFDDSQDKAVLKGGPLDGTYRLIQFHFHWGSLDGQGSEHTVDKKKYAAELHLVHWNTKYGDFGKAVQQPDGLAVLGIFLKVGSAKPGLQKVVDVLDSIKTKGKSADFTNFDPRGLLPESLDYWTYPGSLTTPPLLECMTWIVLKEPISVSSEQVLKFRKLNFNGEGEPEELMVDNWRPAQPLKNRQIKASFK

SEQ ID NO: 210543 - DNA, 777 bp, Artificial Sequence
  Description of Artificial Sequence: Synthetic Destabilizing Domain (DD)
tcccatcactgggggtacggcaaacacaacggacctgagcactggcataaggacttccccattgccaagggagagcgccagtcccctgttgacatcgacactcatacagccaagtatgacccttccctgaagcccctgtctgtttcctatgatcaagcaacttccctgaggatcctcaacaatggtcatgctttcaacgtggagtttgatgactctcaggacaaagcagtgctcaagggaggacccctggatggcacttacagattgattcagtttcactttcactggggttcacttgatggacaaggttcagagcatactgtggataaaaagaaatatgctgcagaacttcacttggttcactggaacaccaaatatggggattttgggaaagctgtgcagcaacctgatggactggccgttctaggtatttttttgaaggttggcagcgctaaaccgggccttcagaaagttgttgatgtgctggattccattaaaacaaagggcaagagtgctgacttcactaacttcgatcctcgtggcctccttcctgaatccctggattactggacctacccaggctcactgaccacccctcctcttctggaatgtatgacctggattgtgctcaaggaacccatcagcgtcagcagcgagcaggtgttgaaattccgtaaacttaacttcaatggggagggtgaacccgaagaactgatggtggacaactggcgcccagctcagccactgaagaacaggcaaatcaaagcttccttcaaa

SEQ ID NO: 210544 - protein, 259 aa, Artificial Sequence
  Description of Artificial Sequence: Synthetic Destabilizing Domain (DD)
SHHWGYGKHNGPEHWHKDFPIAKGERQSPVDIDTHTAKYDPSLKPLSVSYDQATSLRILNNGHAFNVEFFDSQDKAVLKGGPLDGTYRLIQFHFHWGSLDGQGSEHTVDKKKYAAELHLVHWNTKYGDFGKAVQQPDGLAVLGIFLKVGSAKPGLQKVVDVLDSIKTKGKSADFTNFDPRGLLPESLDYWTYPGSLTTPPLLECVTWIVLKEPISVSSEQVLKFRKLNFNGEGEPEELMFDNWRPAQLLKNRQIKASFK

SEQ ID NO: 210545 - DNA, 777 bp, Artificial Sequence
  Description of Artificial Sequence: Synthetic Destabilizing Domain (DD)
tcccatcactgggggtacggcaaacacaacggacctgagcactggcataaggacttccccattgccaagggagagcgccagtcccctgttgacatcgacactcatacagccaagtatgacccttccctgaagcccctgtctgtttcctatgatcaagcaacttccctgaggatcctcaacaatggtcatgctttcaacgtggagttttttgactctcaggacaaagcagtgctcaagggaggacccctggatggcacttacagattgattcagtttcactttcactggggttcacttgatggacaaggttcagagcatactgtggataaaaagaaatatgctgcagaacttcacttggttcactggaacaccaaatatggggattttgggaaagctgtgcagcaacctgatggactggccgttctaggtatttttttgaaggttggcagcgctaaaccgggccttcagaaagttgttgatgtgctggattccattaaaacaaagggcaagagtgctgacttcactaacttcgatcctcgtggcctccttcctgaatccctggattactggacctacccaggctcactgaccacccctcctcttctggaatgtgtgacctggattgtgctcaaggaacccatcagcgtcagcagcgagcaggtgttgaaattccgtaaacttaacttcaatggggagggtgaacccgaagaactgatgtttgacaactggcgcccagctcagttgctgaagaacaggcaaatcaaagcttccttcaaa

SEQ ID NO: 210546 - protein, 259 aa, Artificial Sequence
  Description of Artificial Sequence: Synthetic Destabilizing Domain (DD)
SHHWGYGKHNGPEHWHKDFPIAKGERQSPVDIDTHTAKYDPSLKPLSVSYDQATSLRILNNGHAFNVEFDDSQDKAVLKGGPLDGTYRLIQFHFHWGSLDGQGSEHTVDKKKYAAELHLVHWNTKYGDFGKAVQQPDGLAVLGIFLKVGSAKPGLQKVVDVLDSIKTKGKSADFTNFDPRGLLPESLDYWTFPGSLTTPPLLECVTWIVLKEPISVSSEQVLKFRKLNFNGEGEPEELMVDNWRPAQPLKNRQIKASFK

SEQ ID NO: 210547 - DNA, 777 bp, Artificial Sequence
  Description of Artificial Sequence: Synthetic Destabilizing Domain (DD)
tcccatcactgggggtacggcaaacacaacggacctgagcactggcataaggacttccccattgccaagggagagcgccagtcccctgttgacatcgacactcatacagccaagtatgacccttccctgaagcccctgtctgtttcctatgatcaagcaacttccctgaggatcctcaacaatggtcatgctttcaacgtggagtttgatgactctcaggacaaagcagtgctcaagggaggacccctggatggcacttacagattgattcagtttcactttcactggggttcacttgatggacaaggttcagagcatactgtggataaaaagaaatatgctgcagaacttcacttggttcactggaacaccaaatatggggattttgggaaagctgtgcagcaacctgatggactggccgttctaggtatttttttgaaggttggcagcgctaaaccgggccttcagaaagttgttgatgtgctggattccattaaaacaaagggcaagagtgctgacttcactaacttcgatcctcgtggcctccttcctgaatccctggattactggacctttccaggctcactgaccacccctcctcttctggaatgtgtgacctggattgtgctcaaggaacccatcagcgtcagcagcgagcaggtgttgaaattccgtaaacttaacttcaatggggagggtgaacccgaagaactgatggtggacaactggcgcccagctcagccactgaagaacaggcaaatcaaagcttccttcaaa

SEQ ID NO: 210548 - protein, 259 aa, Artificial Sequence
  Description of Artificial Sequence: Synthetic Destabilizing Domain (DD)
SHHWGYGKHNGPEHWHKDFPIAKGERQSPVDIDTHTAKYDPSLKPLSVSYDQATSLRILNNGHAFNVEFDDSQDKAVLKGGPLDGTYRLIQFHFHWGSLDGQGSEHTVDKKKYAAELHLVHWNTKYGDFGKAVQQPDGLAVLGIFFKVGSAKPGLQKVVDVLDSIKTKGKSADFTNFDPRGLLPESLDYWTYPGSLTTPPLLECVTWIVLKEPISVSSEQVLKFRKLNFNGEGEPEELMVDNWRPAFPLKNRQIKASFK

SEQ ID NO: 210549 - DNA, 777 bp, Artificial Sequence
  Description of Artificial Sequence: Synthetic Destabilizing Domain (DD)
tcccatcactgggggtacggcaaacacaacggacctgagcactggcataaggacttccccattgccaagggagagcgccagtcccctgttgacatcgacactcatacagccaagtatgacccttccctgaagcccctgtctgtttcctatgatcaagcaacttccctgaggatcctcaacaatggtcatgctttcaacgtggagtttgatgactctcaggacaaagcagtgctcaagggaggacccctggatggcacttacagattgattcagtttcactttcactggggttcacttgatggacaaggttcagagcatactgtggataaaaagaaatatgctgcagaacttcacttggttcactggaacaccaaatatggggattttgggaaagctgtgcagcaacctgatggactggccgttctaggtattttttttaaggttggcagcgctaaaccgggccttcagaaagttgttgatgtgctggattccattaaaacaaagggcaagagtgctgacttcactaacttcgatcctcgtggcctccttcctgaatccctggattactggacctacccaggctcactgaccacccctcctcttctggaatgtgtgacctggattgtgctcaaggaacccatcagcgtcagcagcgagcaggtgttgaaattccgtaaacttaacttcaatggggagggtgaacccgaagaactgatggtggacaactggcgcccagcttttccactgaagaacaggcaaatcaaagcttccttcaaa

SEQ ID NO: 210550 - protein, 259 aa, Artificial Sequence
  Description of Artificial Sequence: Synthetic Destabilizing Domain (DD)
SHHWGYGKHNGPEHWHKDFPIAKGERQSPVDIDTHTAKYDPSLKPLSVSYIQATSLRILNNGHAFNVEFDDSQDKAVLKGGPLDGTYRLIQFHFHWGSLDGQGSEHTVDKKKYAAELHLVHWNTKYGDFGKAVQQPDGLAVLGIFLKVGSAKPGLQKVVDVLDSIKTKGKSADFTNFDPRGLLPESLDYWTYPGSLTTPPLLECVTWIVLKEPISVSSEQVLKFRKLNFNGEGEPEELMVDNWRPAQPLKNRQIKAPFK

SEQ ID NO: 210551 - DNA, 777 bp, Artificial Sequence
  Description of Artificial Sequence: Synthetic Destabilizing Domain (DD)
tcccatcactgggggtacggcaaacacaacggacctgagcactggcataaggacttccccattgccaagggagagcgccagtcccctgttgacatcgacactcatacagccaagtatgacccttccctgaagcccctgtctgtttcctatattcaagcaacttccctgaggatcctcaacaatggtcatgctttcaacgtggagtttgatgactctcaggacaaagcagtgctcaagggaggacccctggatggcacttacagattgattcagtttcactttcactggggttcacttgatggacaaggttcagagcatactgtggataaaaagaaatatgctgcagaacttcacttggttcactggaacaccaaatatggggattttgggaaagctgtgcagcaacctgatggactggccgttctaggtatttttttgaaggttggcagcgctaaaccgggccttcagaaagttgttgatgtgctggattccattaaaacaaagggcaagagtgctgacttcactaacttcgatcctcgtggcctccttcctgaatccctggattactggacctacccaggctcactgaccacccctcctcttctggaatgtgtgacctggattgtgctcaaggaacccatcagcgtcagcagcgagcaggtgttgaaattccgtaaacttaacttcaatggggagggtgaacccgaagaactgatggtggacaactggcgcccagctcagccactgaagaacaggcaaatcaaagctcccttcaaa

SEQ ID NO: 210552 - protein, 259 aa, Artificial Sequence
  Description of Artificial Sequence: Synthetic Destabilizing Domain (DD)
SHHWGYGKHNGPEHWHKDFPIAKGERQSPVDIDTHTAKYDPSLKPLSVSYDQATSLRILNNGHAFNVEFDSSQDKAVLKGGPLDGTYRLIQFHFHWGSLDGQGSEHTVDKKKYAAELHLVHWNTKYGDFGKAVQQPDGLAVLGIFLKVGSAKPGLQKVVDVLDSIKTKGKSADFTNFDPRGLLPESLDYWNYPGSLTTPPLLECVTWIVLKEPISVSSEQVLKFRKLNFNGEGEPEELMVDNWRPAQPLKNRQIKASFK

SEQ ID NO: 210553 - DNA, 777 bp, Artificial Sequence
  Description of Artificial Sequence: Synthetic Destabilizing Domain (DD)
tcccatcactgggggtacggcaaacacaacggacctgagcactggcataaggacttccccattgccaagggagagcgccagtcccctgttgacatcgacactcatacagccaagtatgacccttccctgaagcccctgtctgtttcctatgatcaagcaacttccctgaggatcctcaacaatggtcatgctttcaacgtggagtttgatagttctcaggacaaagcagtgctcaagggaggacccctggatggcacttacagattgattcagtttcactttcactggggttcacttgatggacaaggttcagagcatactgtggataaaaagaaatatgctgcagaacttcacttggttcactggaacaccaaatatggggattttgggaaagctgtgcagcaacctgatggactggccgttctaggtatttttttgaaggttggcagcgctaaaccgggccttcagaaagttgttgatgtgctggattccattaaaacaaagggcaagagtgctgacttcactaacttcgatcctcgtggcctccttcctgaatccctggattactggaattacccaggctcactgaccacccctcctcttctggaatgtgtgacctggattgtgctcaaggaacccatcagcgtcagcagcgagcaggtgttgaaattccgtaaacttaacttcaatggggagggtgaacccgaagaactgatggtggacaactggcgcccagctcagccactgaagaacaggcaaatcaaagcttccttcaaa

SEQ ID NO: 210554 - protein, 259 aa, Artificial Sequence
  Description of Artificial Sequence: Synthetic Destabilizing Domain (DD)
SHHWGYGKHNGPEHWHKDFPIAKGERQSPVDIDTHTAKYDPSLKPLSVSYDQATSLRILNNGHAFNVEFDDSQDKAVLKGGPLDGTYRLIQFHFHWGSLDGQGSEHTVDKKKYAAELHLVHWNTKYGDFGKAVQQPDGLAVLGIFLKVGSAKPGLQKVVDVLDSIKTKGKSADFTNFEPRGLLPESLDYWIYPGSLTTPPLLECVTWIVLKEPISVSSEQVLKFRKLNFNGEGEPEELMVDNWRPAQPLKNRQIKASFK

SEQ ID NO: 210555 - DNA, 777 bp, Artificial Sequence
  Description of Artificial Sequence: Synthetic Destabilizing Domain (DD)
tcccatcactgggggtacggcaaacacaacggacctgagcactggcataaggacttccccattgccaagggagagcgccagtcccctgttgacatcgacactcatacagccaagtatgacccttccctgaagcccctgtctgtttcctatgatcaagcaacttccctgaggatcctcaacaatggtcatgctttcaacgtggagtttgatgactctcaggacaaagcagtgctcaagggaggacccctggatggcacttacagattgattcagtttcactttcactggggttcacttgatggacaaggttcagagcatactgtggataaaaagaaatatgctgcagaacttcacttggttcactggaacaccaaatatggggattttgggaaagctgtgcagcaacctgatggactggccgttctaggtatttttttgaaggttggcagcgctaaaccgggccttcagaaagttgttgatgtgctggattccattaaaacaaagggcaagagtgctgacttcactaacttcgagcctcgtggcctccttcctgaatccctggattactggatttacccaggctcactgaccacccctcctcttctggaatgtgtgacctggattgtgctcaaggaacccatcagcgtcagcagcgagcaggtgttgaaattccgtaaacttaacttcaatggggagggtgaacccgaagaactgatggtggacaactggcgcccagctcagccactgaagaacaggcaaatcaaagcttccttcaaa

SEQ ID NO: 210556 - protein, 259 aa, Artificial Sequence
  Description of Artificial Sequence: Synthetic Destabilizing Domain (DD)
SHHWGYGKHNGPEHWHKDFPIAKGERQSPVDIDTHTAKYDPSLKPLSVSYDQATSLRILNNGHAFNVEFDDSQDKAVLKGGPLDGTYRLIQFHFHWGSLDGQGSEHTVDKKKYAAELHLVHWNTKYGDFGKAVQQPDGLAVLGIFLKVGSAKPGLQKVVDVLDSIKTKGKSADFTNFDPRGLLPESLDYWTLPGSLTTPPLLECVTWIVLKEPISVSSEQVLKFRKLNFNGEGEPEELMVDNWRPAQPLKNRQIKASFK

SEQ ID NO: 210557 - DNA, 777 bp, Artificial Sequence
  Description of Artificial Sequence: Synthetic Destabilizing Domain (DD)
tcccatcactgggggtacggcaaacacaacggacctgagcactggcataaggacttccccattgccaagggagagcgccagtcccctgttgacatcgacactcatacagccaagtatgacccttccctgaagcccctgtctgtttcctatgatcaagcaacttccctgaggatcctcaacaatggtcatgctttcaacgtggagtttgatgactctcaggacaaagcagtgctcaagggaggacccctggatggcacttacagattgattcagtttcactttcactggggttcacttgatggacaaggttcagagcatactgtggataaaaagaaatatgctgcagaacttcacttggttcactggaacaccaaatatggggattttgggaaagctgtgcagcaacctgatggactggccgttctaggtatttttttgaaggttggcagcgctaaaccgggccttcagaaagttgttgatgtgctggattccattaaaacaaagggcaagagtgctgacttcactaacttcgatcctcgtggcctccttcctgaatccctggattactggaccttgccaggctcactgaccacccctcctcttctggaatgtgtgacctggattgtgctcaaggaacccatcagcgtcagcagcgagcaggtgttgaaattccgtaaacttaacttcaatggggagggtgaacccgaagaactgatggtggacaactggcgcccagctcagccactgaagaacaggcaaatcaaagcttccttcaaa

SEQ ID NO: 210558 - protein, 259 aa, Artificial Sequence
  Description of Artificial Sequence: Synthetic Destabilizing Domain (DD)
SHHWGYGKHNGPEHWHKDFPIAKGERQSPVDIDTHTAKYDPSLKPLSVSYDQATNLRILNNGHAFNVEFDDSQDKAVLKGGPLDGTYRLIQFHFHWGSLDGKGSEHTVDKKKYAAELHLVHWNTKYGDFGKAVQQPDGLAVLGIFLKVGSAKPGLQKVVDVLDSIKTKGKSADFTNFDPRGLLPESLDYWTYPGSLTTPPLLECVTWIVLKEPISVSSEQVLKFRKLNFNGEGEPEELMVDNWRPAQPLKNRQIKASFK

SEQ ID NO: 210559 - DNA, 777 bp, Artificial Sequence
  Description of Artificial Sequence: Synthetic Destabilizing Domain (DD)
tcccatcactgggggtacggcaaacacaacggacctgagcactggcataaggacttccccattgccaagggagagcgccagtcccctgttgacatcgacactcatacagccaagtatgacccttccctgaagcccctgtctgtttcctatgatcaagcaactaatctgaggatcctcaacaatggtcatgctttcaacgtggagtttgatgactctcaggacaaagcagtgctcaagggaggacccctggatggcacttacagattgattcagtttcactttcactggggttcacttgatggaaagggttcagagcatactgtggataaaaagaaatatgctgcagaacttcacttggttcactggaacaccaaatatggggattttgggaaagctgtgcagcaacctgatggactggccgttctaggtatttttttgaaggttggcagcgctaaaccgggccttcagaaagttgttgatgtgctggattccattaaaacaaagggcaagagtgctgacttcactaacttcgatcctcgtggcctccttcctgaatccctggattactggacctacccaggctcactgaccacccctcctcttctggaatgtgtgacctggattgtgctcaaggaacccatcagcgtcagcagcgagcaggtgttgaaattccgtaaacttaacttcaatggggagggtgaacccgaagaactgatggtggacaactggcgcccagctcagccactgaagaacaggcaaatcaaagcttccttcaaa

SEQ ID NO: 210560 - protein, 259 aa, Artificial Sequence
  Description of Artificial Sequence: Synthetic Destabilizing Domain (DD)
SHHWGYGKHNGPEHWHKDFPIAKGERQSPVDIDTHTAKYDPSLKPLSVSYDQATSLRILNNGHAFNVEFYDSQDKAVLKGGPLDGTYRLIQFHFHWGSLDGQGSEHTVDKKKYAAELHLVHWNTKYGDFGKAVQQPDGLAVLGIFLKVGSAKPGLQKVVDVLDSIKTKGKSADFTNFDPRGLLPESLDYWTYPGSLTTPPLLECVTWIVLKEPISVSSEQVLKFRKLNFNGEGEPEELMVDNWRPALPLKNRQIKASFK

SEQ ID NO: 210561 - DNA, 777 bp, Artificial Sequence
  Description of Artificial Sequence: Synthetic Destabilizing Domain (DD)
tcccatcactgggggtacggcaaacacaacggacctgagcactggcataaggacttccccattgccaagggagagcgccagtcccctgttgacatcgacactcatacagccaagtatgacccttccctgaagcccctgtctgtttcctatgatcaagcaacttccctgaggatcctcaacaatggtcatgctttcaacgtggagttttatgactctcaggacaaagcagtgctcaagggaggacccctggatggcacttacagattgattcagtttcactttcactggggttcacttgatggacaaggttcagagcatactgtggataaaaagaaatatgctgcagaacttcacttggttcactggaacaccaaatatggggattttgggaaagctgtgcagcaacctgatggactggccgttctaggtatttttttgaaggttggcagcgctaaaccgggccttcagaaagttgttgatgtgctggattccattaaaacaaagggcaagagtgctgacttcactaacttcgatcctcgtggcctccttcctgaatccctggattactggacctacccaggctcactgaccacccctcctcttctggaatgtgtgacctggattgtgctcaaggaacccatcagcgtcagcagcgagcaggtgttgaaattccgtaaacttaacttcaatggggagggtgaacccgaagaactgatggtggacaactggcgcccagctcttccactgaagaacaggcaaatcaaagcttccttcaaa

SEQ ID NO: 210562 - protein, 259 aa, Artificial Sequence
  Description of Artificial Sequence: Synthetic Destabilizing Domain (DD)
SHHWGYGKHNGPEHWHKDFPIAKGERQSPVDIDTHTAKYDPSLKPLSVSYDQATSLRILNNGHAFNVEFDDNQDKAVLKGGPLDGTYFLIQFHFHWGSLDGQGSEHTVDKKKYAAELHLVHWNTKYGDFGKAVQQPDGLAVLGIFLKVGSAKPGLQKVVDVLDSIKTKGKSADFTNFDPRGLLPESLDYWTYPGSLTTPPLLECVTWIVLKEPISVSSEQVLKFRKLNFNGEGEPEELMVDNWRPAQPLKNRQIKASFK

SEQ ID NO: 210563 - DNA, 777 bp, Artificial Sequence
  Description of Artificial Sequence: Synthetic Destabilizing Domain (DD)
tcccatcactgggggtacggcaaacacaacggacctgagcactggcataaggacttccccattgccaagggagagcgccagtcccctgttgacatcgacactcatacagccaagtatgacccttccctgaagcccctgtctgtttcctatgatcaagcaacttccctgaggatcctcaacaatggtcatgctttcaacgtggagtttgatgacaatcaggacaaagcagtgctcaagggaggacccctggatggcacttactttttgattcagtttcactttcactggggttcacttgatggacaaggttcagagcatactgtggataaaaagaaatatgctgcagaacttcacttggttcactggaacaccaaatatggggattttgggaaagctgtgcagcaacctgatggactggccgttctaggtatttttttgaaggttggcagcgctaaaccgggccttcagaaagttgttgatgtgctggattccattaaaacaaagggcaagagtgctgacttcactaacttcgatcctcgtggcctccttcctgaatccctggattactggacctacccaggctcactgaccacccctcctcttctggaatgtgtgacctggattgtgctcaaggaacccatcagcgtcagcagcgagcaggtgttgaaattccgtaaacttaacttcaatggggagggtgaacccgaagaactgatggtggacaactggcgcccagctcagccactgaagaacaggcaaatcaaagcttccttcaaa

SEQ ID NO: 210564 - protein, 259 aa, Artificial Sequence
  Description of Artificial Sequence: Synthetic Destabilizing Domain (DD)
SHHWGYGKHNGPEHWHKDFPIAKGERQSPVDIDTHTAKYDPSLKPLSVSYDQATSLRILNNGHAFNVEFKDSQDKAVLKGGPLDGTYRLIQFHFHWGSLDGQGSEHTVDKKKYAAELHLVHWNTKYGDFGKAVQQPDGLAVLGIFLKVGSAKPGLQKVVDVLDSIKTKGKSADFTNFDPRGLLPESLDYWTYPGSLTTPPLLECVTWIVLKEPISVSSEQVLKFRKLNFLGEGGPEEFMVDNWRPAQPLKNRQIKASFK

SEQ ID NO: 210565 - DNA, 777 bp, Artificial Sequence
  Description of Artificial Sequence: Synthetic Destabilizing Domain (DD)
tcccatcactgggggtacggcaaacacaacggacctgagcactggcataaggacttccccattgccaagggagagcgccagtcccctgttgacatcgacactcatacagccaagtatgacccttccctgaagcccctgtctgtttcctatgatcaagcaacttccctgaggatcctcaacaatggtcatgctttcaacgtggagtttaaggactctcaggacaaagcagtgctcaagggaggacccctggatggcacttacagattgattcagtttcactttcactggggttcacttgatggacaaggttcagagcatactgtggataaaaagaaatatgctgcagaacttcacttggttcactggaacaccaaatatggggattttgggaaagctgtgcagcaacctgatggactggccgttctaggtatttttttgaaggttggcagcgctaaaccgggccttcagaaagttgttgatgtgctggattccattaaaacaaagggcaagagtgctgacttcactaacttcgatcctcgtggcctccttcctgaatccctggattactggacctacccaggctcactgaccacccctcctcttctggaatgtgtgacctggattgtgctcaaggaacccatcagcgtcagcagcgagcaggtgttgaaattccgtaaacttaacttccttggggagggtggacccgaagaatttatggtggacaactggcgcccagctcagccactgaagaacaggcaaatcaaagcttccttcaaa

SEQ ID NO: 210566 - protein, 259 aa, Artificial Sequence
  Description of Artificial Sequence: Synthetic Destabilizing Domain (DD)
SHHWGYGKHNGPEHWHKDFPIAKGERQSPVDIDTHTAKYDPSLKPLSVSYDQATSLRILNNGHAFNVEFFDSQDKAVLKGGPLDGTYRLIQFHFHWGSLDGQGSEHTVDKKKYAAELHLVHWNTKYGDFGKAVQQPDGLAVLGIFLKVGSAKPGLQKVVDVLDSIKTKGKSADFTNFDPRGLLPESLDYWTYPGSLTTPPLLECVTWIVLKEPISVSSEQVLKFRKLNFNGEGEPEELMVDNWRPAQPLKNRQIKASFK

SEQ ID NO: 210567 - DNA, 777 bp, Artificial Sequence
  Description of Artificial Sequence: Synthetic Destabilizing Domain (DD)
tcccatcactgggggtacggcaaacacaacggacctgagcactggcataaggacttccccattgccaagggagagcgccagtcccctgttgacatcgacactcatacagccaagtatgacccttccctgaagcccctgtctgtttcctatgatcaagcaacttccctgaggatcctcaacaatggtcatgctttcaacgtggagttttttgactctcaggacaaagcagtgctcaagggaggacccctggatggcacttacagattgattcagtttcactttcactggggttcacttgatggacaaggttcagagcatactgtggataaaaagaaatatgctgcagaacttcacttggttcactggaacaccaaatatggggattttgggaaagctgtgcagcaacctgatggactggccgttctaggtatttttttgaaggttggcagcgctaaaccgggccttcagaaagttgttgatgtgctggattccattaaaacaaagggcaagagtgctgacttcactaacttcgatcctcgtggcctccttcctgaatccctggattactggacctacccaggctcactgaccacccctcctcttctggaatgtgtgacctggattgtgctcaaggaacccatcagcgtcagcagcgagcaggtgttgaaattccgtaaacttaacttcaatggggagggtgaacccgaagaactgatggtggacaactggcgcccagctcagccactgaagaacaggcaaatcaaagcttccttcaaa

SEQ ID NO: 210568 - protein, 259 aa, Artificial Sequence
  Description of Artificial Sequence: Synthetic Destabilizing Domain (DD)
SHHWGYGKHNGPEHWHKDFPIAKGERQSPVDIDTHTAKYDPSLKPLSVSYDQATSLRILNNGHAFNVEFDFSQDKAVLKGGPLDGTYRLIQFHFHWGSLDGQGSEHTVDKKKYAAELHLVHWNTKYGDFGKAVQQPDGLAVLGIFLKVGSAKPGLQKVVDVLDSIKTKGKSADFTNFDPRGLLPESLDYWTYPGSLTTPPLLECVTWIVLKEPISVSSEQVLKFRKLNFNGEGEPEELMVDNWRPAQILKNRQIKASFK

SEQ ID NO: 210569 - DNA, 777 bp, Artificial Sequence
  Description of Artificial Sequence: Synthetic Destabilizing Domain (DD)
tcccatcactgggggtacggcaaacacaacggacctgagcactggcataaggacttccccattgccaagggagagcgccagtcccctgttgacatcgacactcatacagccaagtatgacccttccctgaagcccctgtctgtttcctatgatcaagcaacttccctgaggatcctcaacaatggtcatgctttcaacgtggagtttgatttttctcaggacaaagcagtgctcaagggaggacccctggatggcacttacagattgattcagtttcactttcactggggttcacttgatggacaaggttcagagcatactgtggataaaaagaaatatgctgcagaacttcacttggttcactggaacaccaaatatggggattttgggaaagctgtgcagcaacctgatggactggccgttctaggtatttttttgaaggttggcagcgctaaaccgggccttcagaaagttgttgatgtgctggattccattaaaacaaagggcaagagtgctgacttcactaacttcgatcctcgtggcctccttcctgaatccctggattactggacctacccaggctcactgaccacccctcctcttctggaatgtgtgacctggattgtgctcaaggaacccatcagcgtcagcagcgagcaggtgttgaaattccgtaaacttaacttcaatggggagggtgaacccgaagaactgatggtggacaactggcgcccagctcagattctgaagaacaggcaaatcaaagcttccttcaaa

SEQ ID NO: 210570 - protein, 259 aa, Artificial Sequence
  Description of Artificial Sequence: Synthetic Destabilizing Domain (DD)
SHHWGYGKHNGPEHWHKDFPIAKGERQSPVDIDTHTAKYDPSLKPLSVSYDQATSLRILNNGHAFNVEFDDSQDKAVLKGGPLDGTYRLIQFHFHWGSLDGQGSEHTVDKKKYAAELHLVHWNTKYGDFGKAVQQPDGLAVLGIFLKVGSAKPGLQKVVDVLDSIKTKGKSADFTNFDPRGLLPESLDYWNYPGSLTTPPLLECVTWIVLKEPISVSSEQVLKFRKLNFNGEGEPEELMVDNWRPAQPLKNRQIKASFK

SEQ ID NO: 210571 - DNA, 777 bp, Artificial Sequence
  Description of Artificial Sequence: Synthetic Destabilizing Domain (DD)
tcccatcactgggggtacggcaaacacaacggacctgagcactggcataaggacttccccattgccaagggagagcgccagtcccctgttgacatcgacactcatacagccaagtatgacccttccctgaagcccctgtctgtttcctatgatcaagcaacttccctgaggatcctcaacaatggtcatgctttcaacgtggagtttgatgactctcaggacaaagcagtgctcaagggaggacccctggatggcacttacagattgattcagtttcactttcactggggttcacttgatggacaaggttcagagcatactgtggataaaaagaaatatgctgcagaacttcacttggttcactggaacaccaaatatggggattttgggaaagctgtgcagcaacctgatggactggccgttctaggtatttttttgaaggttggcagcgctaaaccgggccttcagaaagttgttgatgtgctggattccattaaaacaaagggcaagagtgctgacttcactaacttcgatcctcgtggcctccttcctgaatccctggattactggaattacccaggctcactgaccacccctcctcttctggaatgtgtgacctggattgtgctcaaggaacccatcagcgtcagcagcgagcaggtgttgaaattccgtaaacttaacttcaatggggagggtgaacccgaagaactgatggtggacaactggcgcccagctcagccactgaagaacaggcaaatcaaagcttccttcaaa

SEQ ID NO: 210572 - protein, 259 aa, Artificial Sequence
  Description of Artificial Sequence: Synthetic Destabilizing Domain (DD)
  MOD_RES (71)..(71): Any amino acid
  MOD_RES (240)..(240): Any amino acid
  MOD_RES (248)..(248): Any amino acid
SHHWGYGKHNGPEHWHKDFPIAKGERQSPVDIDTHTAKYDPSLKPLSVSYDQATSLRILNNGHAFNVEFDXSQDKAVLKGGPLDGTYRLIQFHFHWGSLDGQGSEHTVDKKKYAAELHLVHWNTKYGDFGKAVQQPDGLAVLGIFLKVGSAKPGLQKVVDVLDSIKTKGKSADFTNFDPRGLLPESLDYWTYPGSLTTPPLLECVTWIVLKEPISVSSEQVLKFRKLNFNGEGEPEELMXDNWRPAQXLKNRQIKASFK

SEQ ID NO: 210573 - DNA, 777 bp, Artificial Sequence
  Description of Artificial Sequence: Synthetic Destabilizing Domain (DD)
tcccatcactgggggtacggcaaacacaacggacctgagcactggcataaggacttccccattgccaagggagagcgccagtcccctgttgacatcgacactcatacagccaagtatgacccttccctgaagcccctgtctgtttcctatgatcaagcaacttccctgaggatcctcaacaatggtcatgctttcaacgtggagtttgatkwytctcaggacaaagcagtgctcaagggaggacccctggatggcacttacagattgattcagtttcactttcactggggttcacttgatggacaaggttcagagcatactgtggataaaaagaaatatgctgcagaacttcacttggttcactggaacaccaaatatggggattttgggaaagctgtgcagcaacctgatggactggccgttctaggtatttttttgaaggttggcagcgctaaaccgggccttcagaaagttgttgatgtgctggattccattaaaacaaagggcaagagtgctgacttcactaacttcgatcctcgtggcctccttcctgaatccctggattactggacctacccaggctcactgaccacccctcctcttctggaatgtgtgacctggattgtgctcaaggaacccatcagcgtcagcagcgagcaggtgttgaaattccgtaaacttaacttcaatggggagggtgaacccgaagaactgatgktkgacaactggcgcccagctcagyyrctgaagaacaggcaaatcaaagcttccttcaaa

SEQ ID NO: 210574 - protein, 259 aa, Artificial Sequence
  Description of Artificial Sequence: Synthetic Destabilizing Domain (DD)
  MOD_RES (53)..(53): Any amino acid
  MOD_RES (55)..(56): Any amino acid
  MOD_RES (191)..(191): Any amino acid
SHHWGYGKHNGPEHWHKDFPIAKGERQSPVDIDTHTAKYDPSLKPLSVSYDQXTXXRILNNGHAFNVEFDDSQDKAVLKGGPLDGTYRLIQFHFHWGSLDGQGSEHTVDKKKYAAELHLVHWNTKYGDFGKAVQQPDGLAVLGIFLKVGSAKPGLQKVVDVLDSIKTKGKSADFTNFDPRGLLPESLDYWXYPGSLTTPPLLECVTWIVLKEPISVSSEQVLKFRKLNFNGEGEPEELMVDNWRPAQPLKNRQIKASFK

SEQ ID NO: 210575 - DNA, 777 bp, Artificial Sequence
  Description of Artificial Sequence: Synthetic Destabilizing Domain (DD)
tcccatcactgggggtacggcaaacacaacggacctgagcactggcataaggacttccccattgccaagggagagcgccagtcccctgttgacatcgacactcatacagccaagtatgacccttccctgaagcccctgtctgtttcctatgatcaagmaacttyyctraggatcctcaacaatggtcatgctttcaacgtggagtttgatgactctcaggacaaagcagtgctcaagggaggacccctggatggcacttacagattgattcagtttcactttcactggggttcacttgatggacaaggttcagagcatactgtggataaaaagaaatatgctgcagaacttcacttggttcactggaacaccaaatatggggattttgggaaagctgtgcagcaacctgatggactggccgttctaggtatttttttgaaggttggcagcgctaaaccgggccttcagaaagttgttgatgtgctggattccattaaaacaaagggcaagagtgctgacttcactaacttcgatcctcgtggcctccttcctgaatccctggattactggwyytacccaggctcactgaccacccctcctcttctggaatgtgtgacctggattgtgctcaaggaacccatcagcgtcagcagcgagcaggtgttgaaattccgtaaacttaacttcaatggggagggtgaacccgaagaactgatggtggacaactggcgcccagctcagccactgaagaacaggcaaatcaaagcttccttcaaa

SEQ ID NO: 210576 - protein, 259 aa, Artificial Sequence
  Description of Artificial Sequence: Synthetic Destabilizing Domain (DD)
SHHWGYGKHNGPEHWHKDFPIAKGERQSPVDIDTHTAKYDPSLKPLSVSYDQATSLRILNNGHAFNVEFDDSQDKAVLKGGPLDGTYRLIQFHFHWGSLDGQGSEHTVDKKKYAAELHLVHWNTKYGDFGKAVQQPDGLAVLGIFLKVGSAKPGLQKVVDVLDSIKTKGKSADFTNFDPRGLLPESLDYWTVPGSLTTPPLLECVTWIVLKEPISVSSEQVLKFRKLNFNGEGEPEELMVDNWRPAQPLKNRQIKASFF

SEQ ID NO: 210577 - DNA, 777 bp, Artificial Sequence
  Description of Artificial Sequence: Synthetic Destabilizing Domain (DD)
tcccatcactgggggtacggcaaacacaacggacctgagcactggcataaggacttccccattgccaagggagagcgccagtcccctgttgacatcgacactcatacagccaagtatgacccttccctgaagcccctgtctgtttcctatgatcaagcaacttccctgaggatcctcaacaatggtcatgctttcaacgtggagtttgatgactctcaggacaaagcagtgctcaagggaggacccctggatggcacttacagattgattcagtttcactttcactggggttcacttgatggacaaggttcagagcatactgtggataaaaagaaatatgctgcagaacttcacttggttcactggaacaccaaatatggggattttgggaaagctgtgcagcaacctgatggactggccgttctaggtatttttttgaaggttggcagcgctaaaccgggccttcagaaagttgttgatgtgctggattccattaaaacaaagggcaagagtgctgacttcactaacttcgatcctcgtggcctccttcctgaatccctggattactggaccgttccaggctcactgaccacccctcctcttctggaatgtgtgacctggattgtgctcaaggaacccatcagcgtcagcagcgagcaggtgttgaaattccgtaaacttaacttcaatggggagggtgaacccgaagaactgatggtggacaactggcgcccagctcagccactgaagaacaggcaaatcaaagcttccttcttt

SEQ ID NO: 210578 - protein, 259 aa, Artificial Sequence
  Description of Artificial Sequence: Synthetic Destabilizing Domain (DD)
SHHWGYGKHNGPEHWHKDFPIAKGERQSPVDIDTHTAKYDPSLKPLSVSYDQATSLRILNNDHAFNVEFDDSQDKAVLKGGPLDGTYRLIQFHFHWGSLDGQGSEHTVDKKKYAAELHLVHWNTKYGDFGKAVQQPDGLAVLGIFLKVGSAKPGLQKVVDVLDSIKTKGKSADFTNFDPRGLLPESLDYWTYPGSLTTPPLLECVTWIVLKEPISVSSEQVLKFRKLNFNGEGEPEELLVDNWRPAQPLKNRQIKASFK

SEQ ID NO: 210579 - DNA, 777 bp, Artificial Sequence
  Description of Artificial Sequence: Synthetic Destabilizing Domain (DD)
tcccatcactgggggtacggcaaacacaacggacctgagcactggcataaggacttccccattgccaagggagagcgccagtcccctgttgacatcgacactcatacagccaagtatgacccttccctgaagcccctgtctgtttcctatgatcaagcaacttccctgaggatcctcaacaatgatcatgctttcaacgtggagtttgatgactctcaggacaaagcagtgctcaagggaggacccctggatggcacttacagattgattcagtttcactttcactggggttcacttgatggacaaggttcagagcatactgtggataaaaaaaaatatgctgcagaacttcacttggttcactggaacaccaaatatggggattttgggaaagctgtgcagcaacctgatggactggccgttctaggtatttttttgaaggttggcagcgctaaaccgggccttcagaaagttgttgatgtgctggattccattaaaacaaagggcaagagtgctgacttcactaacttcgatcctcgtggcctccttcctgaatccctggattactggacctacccaggctcactgaccacccctcctcttctggaatgtgtgacctggattgtgctcaaggaacccatcagcgtcagcagcgagcaggtgttgaaattccgtaaacttaacttcaatggggagggtgaacccgaagaactgcttgtggacaactggcgcccagctcagccactgaagaacaggcaaatcaaagcttccttcaaa

SEQ ID NO: 210580 - protein, 259 aa, Artificial Sequence
  Description of Artificial Sequence: Synthetic Destabilizing Domain (DD)
SHHWGYGKHNGPEHWHKDFPIAKGERQSPVDIDTHTAKYDPSLKPLSVSYDQATSLRILNNGHAFNVEFDDSQDKAVLKGGPLDGTYRLIQFHFHWGSLDGQGSEHTVDKKKYAAELHLVHWNTKYGDFGKAFQQPDGLAVLGIFLKVGSAKPGLQKVVDVLDSIKTKGKSADFTNFDPRGLLPESLDYWTYPGSLTTPPLLECVTWIVLKEPISVSSEQVLKFRKFNFNGEGEPEELMVDNWRPAQPLKNRQIKASFK

SEQ ID NO: 210581 - DNA, 777 bp, Artificial Sequence
  Description of Artificial Sequence: Synthetic Destabilizing Domain (DD)
tcccatcactgggggtacggcaaacacaacggacctgagcactggcataaggacttccccattgccaagggagagcgccagtcccctgttgacatcgacactcatacagccaagtatgacccttccctgaagcccctgtctgtttcctatgatcaagcaacttccctgaggatcctcaacaatggtcatgctttcaacgtggagtttgatgactctcaggacaaagcagtgctcaagggaggacccctggatggcacttacagattgattcagtttcactttcactggggttcacttgatggacaaggttcagagcatactgtggataaaaagaaatatgctgcagaacttcacttggttcactggaacaccaaatatggggattttgggaaagcttttcagcaacctgatggactggccgttctaggtatttttttgaaggttggcagcgctaaaccgggccttcagaaagttgttgatgtgctggattccattaaaacaaagggcaagagtgctgacttcactaacttcgatcctcgtggcctccttcctgaatccctggattactggacctacccaggctcactgaccacccctcctcttctggaatgtgtgacctggattgtgctcaaggaacccatcagcgtcagcagcgagcaggtgttgaaattccgtaaatttaacttcaatggggagggtgaacccgaagaactgatggtggacaactggcgcccagctcagccactgaagaacaggcaaatcaaagcttccttcaaa

SEQ ID NO: 210582 - protein, 259 aa, Artificial Sequence
  Description of Artificial Sequence: Synthetic Destabilizing Domain (DD)
SHHWGYGKHNGPEHWHKDFPIAKGERQSPVDIDTHTAKYDPSLKPLSVSYDQATSLRILNNGHAFNVEFGDSQDKAVLKGGPLDGTYRLIQFHFHWGSLDGQGSEHTVDKKKYAAELHLVHWNTKYGDFGKAVQQPDGLAVLGIFLKVGSAKPGLQKVVDVLDSIKTKGKSADFTNFDPRGLLPESLDYWTYPGSLTTPPLLECVTWIVLKEPISVSSEQVLKFRKLNFKGEGEPEELMVDNWRPAQPLKNRQIKASFK

SEQ ID NO: 210583 - DNA, 777 bp, Artificial Sequence
  Description of Artificial Sequence: Synthetic Destabilizing Domain (DD)
tcccatcactgggggtacggcaaacacaacggacctgagcactggcataaggacttccccattgccaagggagagcgccagtcccctgttgacatcgacactcatacagccaagtatgacccttccctgaagcccctgtctgtttcctatgatcaagcaacttccctgaggatcctcaacaatggtcatgctttcaacgtggagtttggtgactctcaggacaaagcagtgctcaagggaggacccctggatggcacttacagattgattcagtttcactttcactggggttcacttgatggacaaggttcagagcatactgtggataaaaagaaatatgctgcagaacttcacttggttcactggaacaccaaatatggggattttgggaaagctgtgcagcaacctgatggactggccgttctaggtatttttttgaaggttggcagcgctaaaccgggccttcagaaagttgttgatgtgctggattccattaaaacaaagggcaagagtgctgacttcactaacttcgatcctcgtggcctccttcctgaatccctggattactggacctacccaggctcactgaccacccctcctcttctggaatgtgtgacctggattgtgctcaaggaacccatcagcgtcagcagcgagcaggtgttgaaattccgtaaacttaacttcaagggggagggtgaacccgaagaactgatggtggacaactggcgcccagctcagccactgaagaacaggcaaatcaaagcttccttcaaa

SEQ ID NO: 210584 - protein, 259 aa, Artificial Sequence
  Description of Artificial Sequence: Synthetic Destabilizing Domain (DD)
SHHWGYGKHNGPEHWHKDFPIAKGERQSPVDIDTHTAKYDPSLKPLSVSYDQATFLRILNNGHAFNVEFSDSQDKAVLKGGPLDGTYRLIQFHFHWGSLDGQGSEHTVDKKKYAAELHLVHWNTKYGDFGKAVQQPDGLAVLGIFLKVGSAKPGLQKVVDVLDSIKTKGKSADFTNFDPRGLLPESLDYWTYPGSLTTPPLLECVTWIVLKEPISVSSEQVLKFRKLNFNGEGEPEELMVDNWRPAQPLKNRQIKASFK

SEQ ID NO: 210585 - DNA, 777 bp, Artificial Sequence
  Description of Artificial Sequence: Synthetic Destabilizing Domain (DD)
tcccatcactgggggtacggcaaacacaacggacctgagcactggcataaggacttccccattgccaagggagagcgccagtcccctgttgacatcgacactcatacagccaagtatgacccttccctgaagcccctgtctgtttcctatgatcaagcaacttttctgaggatcctcaacaatggtcatgctttcaacgtggagtttagtgactctcaggacaaagcagtgctcaagggaggacccctggatggcacttacagattgattcagtttcactttcactggggttcacttgatggacaaggttcagagcatactgtggataaaaagaaatatgctgcagaacttcacttggttcactggaacaccaaatatggggattttgggaaagctgtgcagcaacctgatggactggccgttctaggtatttttttgaaggttggcagcgctaaaccgggccttcagaaagttgttgatgtgctggattccattaaaacaaagggcaagagtgctgacttcactaacttcgatcctcgtggcctccttcctgaatccctggattactggacctacccaggctcactgaccacccctcctcttctggaatgtgtgacctggattgtgctcaaggaacccatcagcgtcagcagcgagcaggtgttgaaattccgtaaacttaacttcaatggggagggtgaacccgaagaactgatggtggacaactggcgcccagctcagccactgaagaacaggcaaatcaaagcttccttcaaa

SEQ ID NO: 210586 - protein, 259 aa, Artificial Sequence
  Description of Artificial Sequence: Synthetic Destabilizing Domain (DD)
SHHWGYGKHNGPEHWHKDFPIAKGERQSPVDIDTHTAKYDPSLKPLSVSYLQATSLRILNNGHAFNVEFDDSQDKAVLKGGPLDGTYRLIQFHFHWGSLDGQGSEHTVDKKKYAAELHLVHWNTKYRDFGKAVQQPDGLAVLGIFLKVGSAKPGLQKVVDVLDSIKTKGKSADFTNFDPRGLLPESLDYWTYPGSLTTPPLLECVTWIVLKEPISVSSEQVLKFRKLNFNGEGEPEELMVDNWRPAFPLKNRQIKASFK

SEQ ID NO: 210587 - DNA, 777 bp, Artificial Sequence
  Description of Artificial Sequence: Synthetic Destabilizing Domain (DD)
tcccatcactgggggtacggcaaacacaacggacctgagcactggcataaggacttccccattgccaagggagagcgccagtcccctgttgacatcgacactcatacagccaagtatgacccttccctgaagcccctgtctgtttcctatctgcaagcaacttccctgaggatcctcaacaatggtcatgctttcaacgtggagtttgatgactctcaggacaaagcagtgctcaagggaggacccctggatggcacttacagattgattcagtttcactttcactggggttcacttgatggacaaggttcagagcatactgtggataaaaagaaatatgctgcagaacttcacttggttcactggaacaccaaatatagagattttgggaaagctgtgcagcaacctgatggactggccgttctaggtatttttttgaaggttggcagcgctaaaccgggccttcagaaagttgttgatgtgctggattccattaaaacaaagggcaagagtgctgacttcactaacttcgatcctcgtggcctccttcctgaatccctggattactggacctacccaggctcactgaccacccctcctcttctggaatgtgtgacctggattgtgctcaaggaacccatcagcgtcagcagcgagcaggtgttaaaattccgtaaacttaacttcaatggggagggtgaacccgaagaactgatggtggacaactggcgcccagcttttccactgaagaacaggcaaatcaaagcttccttcaaa

SEQ ID NO: 210588 - protein, 259 aa, Artificial Sequence
  Description of Artificial Sequence: Synthetic Destabilizing Domain (DD)
  MOD_RES (72)..(72): Any amino acid
  MOD_RES (88)..(88): Any amino acid
SHHWGYGKHNGPEHWHKDFPIAKGERQSPVDIDTHTAKYDPSLKPLSVSYDQATSLRILNNGHAFNVEFDDXQDKAVLKGGPLDGTYXLIQFHFHWGSLDGQGSEHTVDKKKYAAELHLVHWNTKYGDFGKAVQQPDGLAVLGIFLKVGSAKPGLQKVVDVLDSIKTKGKSADFTNFDPRGLLPESLDYWTYPGSLTTPPLLECVTWIVLKEPISVSSEQVLKFRKLNFNGEGEPEELMVDNWRPAQPLKNRQIKASFK

SEQ ID NO: 210589 - DNA, 777 bp, Artificial Sequence
  Description of Artificial Sequence: Synthetic Destabilizing Domain (DD)
tcccatcactgggggtacggcaaacacaacggacctgagcactggcataaggacttccccattgccaagggagagcgccagtcccctgttgacatcgacactcatacagccaagtatgacccttccctgaagcccctgtctgtttcctatgatcaagcaacttccctgaggatcctcaacaatggtcatgctttcaacgtggagtttgatgacwmtcaggacaaagcagtgctcaagggaggacccctggatggcacttacttwttgattcagtttcactttcactggggttcacttgatggacaaggttcagagcatactgtggataaaaagaaatatgctgcagaacttcacttggttcactggaacaccaaatatggggattttgggaaagctgtgcagcaacctgatggactggccgttctaggtatttttttgaaggttggcagcgctaaaccgggccttcagaaagttgttgatgtgctggattccattaaaacaaagggcaagagtgctgacttcactaacttcgatcctcgtggcctccttcctgaatccctggattactggacctacccaggctcactgaccacccctcctcttctggaatgtgtgacctggattgtgctcaaggaacccatcagcgtcagcagcgagcaggtgttgaaattccgtaaacttaacttcaatggggagggtgaacccgaagaactgatggtggacaactggcgcccagctcagccactgaagaacaggcaaatcaaagcttccttcaaa

SEQ ID NO: 210590 - protein, 259 aa, Artificial Sequence
  Description of Artificial Sequence: Synthetic Destabilizing Domain (DD)
  MOD_RES (192)..(192): Any amino acid
SHHWGYGKHNGPEHWHKDFPIAKGERQSPVDIDTHTAKYDPSLKPLSVSYDQATSLRILNNGHAFNVEFDDSQDKAVLKGGPLDGTYRLIQFHFHWGSLDGQGSEHTVDKKKYAAELHLVHWNTKYGDFGKAVQQPDGLAVLGIFLKVGSAKPGLQKVVDVLDSIKTKGKSADFTNFDPRGLLPESLDYWTXPGSLTTPPLLECVTWIVLKEPISVSSEQVLKFRKLNFNGEGEPEELMVDNWRPAQPLKNRQIKASFK

SEQ ID NO: 210591 - DNA, 777 bp, Artificial Sequence
  Description of Artificial Sequence: Synthetic Destabilizing Domain (DD)
tcccatcactgggggtacggcaaacacaacggacctgagcactggcataaggacttccccattgccaagggagagcgccagtcccctgttgacatcgacactcatacagccaagtatgacccttccctgaagcccctgtctgtttcctatgatcaagcaacttccctgaggatcctcaacaatggtcatgctttcaacgtggagtttgatgactctcaggacaaagcagtgctcaagggaggacccctggatggcacttacagattgattcagtttcactttcactggggttcacttgatggacaaggttcagagcatactgtggataaaaagaaatatgctgcagaacttcacttggttcactggaacaccaaatatggggattttgggaaagctgtgcagcaacctgatggactggccgttctaggtatttttttgaaggttggcagcgctaaaccgggccttcagaaagttgttgatgtgctggattccattaaaacaaagggcaagagtgctgacttcactaacttcgatcctcgtggcctccttcctgaatccctggattactggaccwwyccaggctcactgaccacccctcctcttctggaatgtgtgacctggattgtgctcaaggaacccatcagcgtcagcagcgagcaggtgttgaaattccgtaaacttaacttcaatggggagggtgaacccgaagaactgatggtggacaactggcgcccagctcagccactgaagaacaggcaaatcaaagcttccttcaaa

SEQ ID NO: 210592 - protein, 259 aa, Artificial Sequence
  Description of Artificial Sequence: Synthetic Destabilizing Domain (DD)
  MOD_RES (50)..(50): Any amino acid
  MOD_RES (71)..(71): Any amino acid
  MOD_RES (240)..(240): Any amino acid
  MOD_RES (248)..(248): Any amino acid
SHHWGYGKHNGPEHWHKDFPIAKGERQSPVDIDTHTAKYDPSLKPLSVSXDQATSLRILNNGHAFNVEFDXSQDKAVLKGGPLDGTYRLIQFHFHWGSLDGQGSEHTVDKKKYAAELHLVHWNTKYGDFGKAVQQPDGLAVLGIFLKVGSAKPGLQKVVDVLDSIKTKGKSADFTNFDPRGLLPESLDYWTYPGSLTTPPLLECVTWIVLKEPISVSSEQVLKFRKLNFNGEGEPEELMXDNWRPAQXLKNRQIKASFK

SEQ ID NO: 210593 - DNA, 777 bp, Artificial Sequence
  Description of Artificial Sequence: Synthetic Destabilizing Domain (DD)
tcccatcactgggggtacggcaaacacaacggacctgagcactggcataaggacttccccattgccaagggagagcgccagtcccctgttgacatcgacactcatacagccaagtatgacccttccctgaagcccctgtctgtttccwmtgatcaagcaacttccctgaggatcctcaacaatggtcatgctttcaacgtggagtttgatkwytctcaggacaaagcagtgctcaagggaggacccctggatggcacttacagattgattcagtttcactttcactggggttcacttgatggacaaggttcagagcatactgtggataaaaagaaatatgctgcagaacttcacttggttcactggaacaccaaatatggggattttgggaaagctgtgcagcaacctgatggactggccgttctaggtatttttttgaaggttggcagcgctaaaccgggccttcagaaagttgttgatgtgctggattccattaaaacaaagggcaagagtgctgacttcactaacttcgatcctcgtggcctccttcctgaatccctggattactggacctacccaggctcactgaccacccctcctcttctggaatgtgtgacctggattgtgctcaaggaacccatcagcgtcagcagcgagcaggtgttgaaattccgtaaacttaacttcaatggggagggtgaacccgaagaactgatgktkgacaactggcgcccagctcagyyactgaagaacaggcaaatcaaagcttccttcaaa

SEQ ID NO: 210594 - protein, 259 aa, Artificial Sequence
  Description of Artificial Sequence: Synthetic Destabilizing Domain (DD)
SHHWGYGKHNGPEHWHKDFPIAKGERQSPVDIDTHTAKYDPSLKPLSVSYDQATSLRILNNGHAFNVEFDISQDKAVLKGGPLDGTYRLIQFHFHCGSLDGQGSEHTVDKKKYAAELHLVHWNTKYGDFGKAVQQPDGLAVLGIFLKVGSAKPGLQKVVDVLDSIKTKGKSADFTNFDPRGLLPESLDYWTYPGSLTTPPLLECVTWIVLKEPISVSSEQVLKFRKLNFNGEGEPEELMVDNWRPAQPLKNRQIKASFK

SEQ ID NO: 210595 - DNA, 777 bp, Artificial Sequence
  Description of Artificial Sequence: Synthetic Destabilizing Domain (DD)
tcccatcactgggggtacggcaaacacaacggacctgagcactggcataaggacttccccattgccaagggagagcgccagtcccctgttgacatcgacactcatacagccaagtatgacccttccctgaagcccctgtctgtttcctatgatcaagcaacttccctgaggatcctcaacaatggtcatgctttcaacgtggagtttgatatttctcaggacaaagcagtgctcaagggaggacccctggatggcacttacagattgattcagtttcactttcactgcggttcacttgatggacaaggttcagagcatactgtggataaaaagaaatatgctgcagaacttcacttggttcactggaacaccaaatatggggattttgggaaagctgtgcagcaacctgatggactggccgttctaggtatttttttgaaggttggcagcgctaaaccgggccttcagaaagttgttgatgtgctggattccattaaaacaaagggcaagagtgctgacttcactaacttcgatcctcgtggcctccttcctgaatccctggattactggacctacccaggctcactgaccacccctcctcttctggaatgtgtgacctggattgtgctcaaggaacccatcagcgtcagcagcgagcaggtgttgaaattccgtaaacttaacttcaatggggagggtgaacccgaagaactgatggtggacaactggcgcccagctcagccactgaagaacaggcaaatcaaagcttccttcaaa

SEQ ID NO: 210596 - protein, 259 aa, Artificial Sequence
  Description of Artificial Sequence: Synthetic Destabilizing Domain (DD)
SHHWGYGKHNGPEHWHKDFPIAKGERQSPVDIDTHTAKYDPSLKPLSVSYDQATSLRILNNGHAFNVEFKDSQDKAVLKGGPLDGTYRLIQFHFHWGSLDGQGSEHTVDKKKYAAELHLVHWNTKYGDFGKAVQQPDGLAVLGIFLKVGSAKPGLQKVVDVLDSIKTKGKSADFTNFDPRGLLPESLDYWFYPGSLTTPPLLECVTWIVLKEPISVSSEQVLKFRKLNFFGEGEPEELMVDNWRPAQPLKNRQIKASFK

SEQ ID NO: 210597 - DNA, 777 bp, Artificial Sequence
  Description of Artificial Sequence: Synthetic Destabilizing Domain (DD)
tcccatcactgggggtacggcaaacacaacggacctgagcactggcataaggacttccccattgccaagggagagcgccagtcccctgttgacatcgacactcatacagccaagtatgacccttccctgaagcccctgtctgtttcctatgatcaagcaacttccctgaggatcctcaacaatggtcatgctttcaacgtggagtttaaggactctcaggacaaagcagtgctcaagggaggacccctggatggcacttacagattgattcagtttcactttcactggggttcacttgatggacaaggttcagagcatactgtggataaaaagaaatatgctgcagaacttcacttggttcactggaacaccaaatatggggattttgggaaagctgtgcagcaacctgatggactggccgttctaggtatttttttgaaggttggcagcgctaaaccgggccttcagaaagttgttgatgtgctggattccattaaaacaaagggcaagagtgctgacttcactaacttcgatcctcgtggcctccttcctgaatccctggattactggttttacccaggctcactgaccacccctcctcttctggaatgtgtgacctggattgtgctcaaggaacccatcagcgtcagcagcgagcaggtgttgaaattccgtaaacttaacttctttggggagggtgaacccgaagaactgatggtggacaactggcgcccagctcagccactgaagaacaggcaaatcaaagcttccttcaaa

SEQ ID NO: 210598 - protein, 259 aa, Artificial Sequence
  Description of Artificial Sequence: Synthetic Destabilizing Domain (DD)
SHHWGYGKHNGPEHWHKDFPIAKGERQSPVDIDTHTAKYDPSLKPLSVSYDQATSLRNLNNGHAFNVEFDDSQDKAVLKGGPLDGTYRLIQFHFHWGSLDRQGSEHTVDKKKYAAELHLVHWNTKYGDFGKAVQQPDGLAVLGIFLKVGSAKPGLQKVVDVLDSIKTKGKSADFTNFDPRGLLPESLDYWTYPGSLTTPPLLECVTWIVLKEPISVSSEQVLKFRKLNFNGEGEPEELMVDNWRPAQPLKNRQIKASFK

SEQ ID NO: 210599 - DNA, 777 bp, Artificial Sequence
  Description of Artificial Sequence: Synthetic Destabilizing Domain (DD)
tcccatcactgggggtacggcaaacacaacggacctgagcactggcataaggacttccccattgccaagggagagcgccagtcccctgttgacatcgacactcatacagccaagtatgacccttccctgaagcccctgtctgtttcctatgatcaagcaacttccctgagaaacctcaacaatggtcatgctttcaacgtggagtttgatgactctcaggacaaagcagtgctcaagggaggacccctggatggcacttacagattgattcagtttcactttcactggggttcacttgatcgacaaggttcagagcatactgtggataaaaagaaatatgctgcagaacttcacttggttcactggaacaccaaatatggggattttgggaaagctgtgcagcaacctgatggactggccgttctaggtatttttttgaaggttggcagcgctaaaccgggccttcagaaagttgttgatgtgctggattccattaaaacaaagggcaagagtgctgacttcactaacttcgatcctcgtggcctccttcctgaatccctggattactggacctacccaggctcactgaccacccctcctcttctggaatgtgtgacctggattgtgctcaaggaacccatcagcgtcagcagcgagcaggtgttgaaattccgtaaacttaacttcaatggggagggtgaacccgaagaactgatggtggacaactggcgcccagctcagccactgaagaacaggcaaatcaaagcttccttcaaa

SEQ ID NO: 210600 - protein, 259 aa, Artificial Sequence
  Description of Artificial Sequence: Synthetic Destabilizing Domain (DD)
SHHWGYGKHNGPEHWHKDFPIAKGERQSPVDIDTHTAKYDPSLKPLSVSYDQATSLRILNNGHAFNVEFDDSQDKAVLKGGPLDGTYRLIQFHFHWGSLDGQGSEHTVDKKKYAAELHLVHWNTKYGDFGKAVQQPDGLAVLGIFLKVGSAKPGHQKVVDVLDSIKTKGKSADFTNFDPRGLLPESLDYWTYPGSLTTPPLLECVTWIVLKEPISVSSEQVLKFRKLNFNGEGEPEELMVDNWRPAQPLKNRQIKASFK

SEQ ID NO: 210601 - DNA, 777 bp, Artificial Sequence
  Description of Artificial Sequence: Synthetic Destabilizing Domain (DD)
tcccatcactgggggtacggcaaacacaacggacctgagcactggcataaggacttccccattgccaagggagagcgccagtcccctgttgacatcgacactcatacagccaagtatgacccttccctgaagcccctgtctgtttcctatgatcaagcaacttccctgagaatcctcaacaatggtcatgctttcaacgtggagtttgatgactctcaggacaaagcagtgctcaagggaggacccctggatggcacttacagattgattcagtttcactttcactggggttcacttgatggacaaggttcagagcatactgtggataaaaagaaatatgctgcagaacttcacttggttcactggaacaccaaatatggggattttgggaaagctgtgcagcaacctgatggactggccgttctaggtatttttttgaaggttggcagcgctaaaccgggccatcagaaagttgttgatgtgctggattccattaaaacaaagggcaagagtgctgacttcactaacttcgatcctcgtggcctccttcctgaatccctggattactggacctacccaggctcactgaccacccctcctcttctggaatgtgtgacctggattgtgctcaaggaacccatcagcgtcagcagcgagcaggtgttgaaattccgtaaacttaacttcaatggggagggtgaacccgaagaactgatggtggacaactggcgcccagctcagccactgaagaacaggcaaatcaaagcttccttcaaa

SEQ ID NO: 210602 - protein, 260 aa, Artificial Sequence
  Description of Artificial Sequence: Synthetic Destabilizing Domain (DD)
MSHHWGYGKHNGPEHWHKDFPIAKGERQSPVDIDTHTAKYDPSLKPLSVSYDQATSLRILNNGHAFNVEFDDSQDKAVLKGGPLDGTYRLIQFHFHWGSLDGQGSEHTVDKKKYAAELHLVHWNTKYGDFGKAVQQPDGLAVLGIFLKVGSAKPGHQKVVDVLDSIKTKGKSADFTNFDPRGLLPESLDYWTYPGSLTTPPLLECVTWIVLKEPISVSSEQVLKFRKLNFNGEGEPEELMVDNWRPAQPLKNRQIKASFK

SEQ ID NO: 210603 - DNA, 780 bp, Artificial Sequence
  Description of Artificial Sequence: Synthetic Destabilizing Domain (DD)
atgtcccatcactgggggtacggcaaacacaacggacctgagcactggcataaggacttccccattgccaagggagagcgccagtcccctgttgacatcgacactcatacagccaagtatgacccttccctgaagcccctgtctgtttcctatgatcaagcaacttccctgagaatcctcaacaatggtcatgctttcaacgtggagtttgatgactctcaggacaaagcagtgctcaagggaggacccctggatggcacttacagattgattcagtttcactttcactggggttcacttgatggacaaggttcagagcatactgtggataaaaagaaatatgctgcagaacttcacttggttcactggaacaccaaatatggggattttgggaaagctgtgcagcaacctgatggactggccgttctaggtatttttttgaaggttggcagcgctaaaccgggccatcagaaagttgttgatgtgctggattccattaaaacaaagggcaagagtgctgacttcactaacttcgatcctcgtggcctccttcctgaatccctggattactggacctacccaggctcactgaccacccctcctcttctggaatgtgtgacctggattgtgctcaaggaacccatcagcgtcagcagcgagcaggtgttgaaattccgtaaacttaacttcaatggggagggtgaacccgaagaactgatggtggacaactggcgcccagctcagccactgaagaacaggcaaatcaaagcttccttcaaa

SEQ ID NO: 210604 - protein, 114 aa, Homo sapiens
NWVNVISDLKKIEDLIQSMHIDATLYTESDVHPSCKVTAMKCFLLELQVISLESGDASIHDTVENLIILANNSLSSNGNVTESGCKECEELEEKNIKEFLQSFVHIVQMFINTS

SEQ ID NO: 210605 - DNA, 342 bp, Artificial Sequence
  Description of Artificial Sequence: Synthetic Construct
aactgggtgaacgtgatctccgacctgaaaaagatcgaggatttgatccagagcatgcacattgacgccaccctgtataccgagtccgacgtgcacccgagttgcaaggtgactgccatgaagtgcttcctgctggagctgcaagtgatcagcctggagagcggcgacgccagcatccacgacaccgtggaaaaccttatcattctggccaacaatagcctgagcagcaacggcaacgtgaccgaaagcggatgtaaggaatgcgaggaactggaagagaagaatatcaaagaattcctgcaaagcttcgtgcacatcgtgcagatgttcatcaacacttct

SEQ ID NO: 210606 - DNA, 342 bp, Artificial Sequence
  Description of Artificial Sequence: Synthetic Construct
aattgggtcaacgtgatcagcgacctgaagaagatcgaggacctgatccagagcatgcacatcgacgccacactgtacaccgagtccgatgtgcaccctagctgcaaagtgaccgccatgaagtgctttctgctggaactgcaagtgatcagcctggaaagcggcgacgccagcatccacgataccgtggaaaatctgatcatcctggccaacaacagcctgagcagcaacggcaatgtgaccgagagcggctgcaaagagtgcgaggaactggaagagaagaacatcaaagagttcctccagagcttcgtccacatcgtgcagatgttcatcaacaccagc

SEQ ID NO: 210607 - DNA, 342 bp, Artificial Sequence
  Description of Artificial Sequence: Synthetic Construct
aactgggtgaatgtaataagtgatttgaaaaaaattgaagatcttattcaatctatgcatattgatgctactttatatacggaaagtgatgttcaccccagttgcaaagtaacagcaatgaagtgctttctcttggagttacaagttatttcacttgagtccggagatgcaagtattcatgatacagtagaaaatctgatcatcctagcaaacaacagtttgtcttctaatgggaatgtaacagaatctggatgcaaagaatgtgaggaactggaggaaaaaaatattaaagaatttttgcagagttttgtacatattgtccaaatgttcatcaacacttct

SEQ ID NO: 210608 - DNA, 342 bp, Artificial Sequence
  Description of Artificial Sequence: Synthetic Construct
aactgggtgaacgtgatctccgacctgaagaagatcgaggacctgatccagtccatgcacatcgacgccaccctgtacaccgagagcgacgtgcaccctagctgcaaggtgaccgccatgaagtgcttcctgctggagctgcaggtgatcagcctggagagcggcgatgccagcatccacgacacagtggagaacctgatcatcctggccaacaacagcctgagcagcaacggcaatgtgaccgagagcggctgcaaggagtgcgaggagctggaggagaagaacatcaaggagttcctgcagtccttcgtgcacatcgtgcagatgttcatcaacaccagc

SEQ ID NO: 210609 - DNA, 342 bp, Artificial Sequence
  Description of Artificial Sequence: Synthetic Construct
aactgggtcaacgtgatcagcgacctgaagaagatcgaggacctcatccagtccatgcacattgacgccaccctgtacaccgagtccgatgtgcaccctagctgcaaggtgaccgccatgaaatgcttcctgctggagctgcaggtcatctccttagaaagcggcgatgcctccatccacgacaccgtggagaacctgatcatcctggccaataactccctgagcagcaacggcaacgtgaccgagagcggctgcaaagagtgtgaagagctggaggagaagaacattaaggagttcctgcagagcttcgtgcacatcgtgcaaatgttcatcaacaccagc

SEQ ID NO: 210610 - DNA, 342 bp, Artificial Sequence
  Description of Artificial Sequence: Synthetic Construct
aactgggtgaatgtgatcagcgacctgaagaagatcgaggatctgatccagagcatgcacattgatgccaccctgtacacagaatctgatgtgcaccctagctgtaaagtgaccgccatgaagtgttttctgctggagctgcaggtgatttctctggaaagcggagatgcctctatccacgacacagtggagaatctgatcatcctggccaacaatagcctgagcagcaatggcaatgtgacagagtctggctgtaaggagtgtgaggagctggaggagaagaacatcaaggagtttctgcagagctttgtgcacatcgtgcagatgttcatcaatacaagc

SEQ ID NO: 210611 - protein, 237 aa, Homo sapiens
ITCPPPMSVEHADIWVKSYSLYSRERYICNSGFKRKAGTSSLTECVLNKATNVAHWTTPSLKCIRDPALVHQRPAPPSTVTTAGVTPQPESLSPSGKEPAASSPSSNNTAATTAAIVPGSQLMPSKSPSTGTTEISSHESSHGTPSQTTAKNWELTASASHQPPGVYPQGHSDTTVAISTSTVLLCGLSAVSLLACYLKSRQTPPLASVEMEAMEALPVTWGTSSRDEDLENCSHHL

SEQ ID NO: 210612 - DNA, 711 bp, Artificial Sequence
  Description of Artificial Sequence: Synthetic Construct
attacctgcccccctccgatgagcgtggagcacgccgacatctgggtcaagagctacagcttgtatagtagggagcggtacatctgtaacagcgggttcaagaggaaggccgggaccagctcactgaccgagtgcgtgttgaacaaggccaccaacgtggcccactggaccacccctagccttaagtgcatcagggacccagcgctcgtacaccagagacccgcgcctccctctacggtaaccacggcaggcgtaaccccccagcccgagagcctgtccccgagcggcaaggagcctgcagcgagcagcccctcaagcaacaacacagccgctaccaccgcggcaatcgtgcccggcagccagctgatgccctcaaagagccccagcaccggcaccactgagataagcagccacgagagctcacacggcactccctcacagaccactgccaagaattgggagctgaccgcctctgccagccaccagcccccaggcgtgtatccccagggccacagcgacaccacggtcgccatcagcacatctacagtgcttttgtgcggccttagcgccgtgtcactgctggcatgctacttgaaaagtaggcaaactccccctcttgccagtgtggaaatggaggccatggaagccctgcccgtgacctggggcaccagttctagggacgaggaccttgagaactgctcacatcatttg

SEQ ID NO: 210613 - DNA, 711 bp, Artificial Sequence
  Description of Artificial Sequence: Synthetic Construct
atcacctgtcctccacctatgagcgtggaacacgccgacatctgggtcaagagctacagcctgtacagcagagagcggtacatctgcaacagcggcttcaagagaaaggccggcacaagcagcctgaccgagtgtgtgctgaacaaggccacaaacgtggcccactggaccacacctagcctgaagtgcatcagagatcccgctctggttcaccagaggcctgctcctccatctacagtgacaacagctggcgtgacccctcagcctgagtctctgtctccatctggaaaagagcctgccgccagctctcccagctctaacaatactgctgccaccacagccgccatcgtgcctggatctcagctgatgcctagcaagagccctagcaccggcacaacagagatcagctctcacgagtctagccacggcaccccatctcagaccacagccaagaattgggagctgaccgcctctgcctctcatcagccacctggtgtttaccctcaaggccactctgataccaccgtggccatcagcacaagcacagtgctgctgtgtggactgtctgccgtgtctctgctggcctgctacctgaagtctagacagacacctcctctggccagcgtggaaatggaagccatggaagctctgcctgtgacatggggcaccagcagcagagatgaggacctcgagaattgcagccaccacctg

SEQ ID NO: 210614 - DNA, 711 bp, Artificial Sequence
  Description of Artificial Sequence: Synthetic Construct
atcacgtgccctccccccatgtccgtggaacacgcagacatctgggtcaagagctacagcttgtactccagggagcggtacatttgtaactctggtttcaagcgtaaagccggcacgtccagcctgacggagtgcgtgttgaacaaggccacgaatgtcgcccactggacaacccccagtctcaaatgcattagagaccctgccctggttcaccaaaggccagcgccaccctccacagtaacgacggcaggggtgaccccacagccagagagcctctccccttctggaaaagagcccgcagcttcatctcccagctcaaacaacacagcggccacaacagcagctattgtcccgggctcccagctgatgccttcaaaatcaccttccacaggaaccacagagataagcagtcatgagtcctcccacggcaccccctctcagacaacagccaagaactgggaactcacagcatccgcctcccaccagccgccaggtgtgtatccacagggccacagcgacaccactgtggctatctccacgtccactgtcctgctgtgtgggctgagcgctgtgtctctcctggcatgctacctcaagtcaaggcaaactcccccgctggccagcgttgaaatggaagccatggaggctctgccggtgacttgggggaccagcagcagagatgaagacttggaaaactgctctcaccaccta

SEQ ID NO: 210615 - DNA, 711 bp, Artificial Sequence
  Description of Artificial Sequence: Synthetic Construct
attacatgccctcctccaatgtctgtggagcacgccgatatttgggtgaagtcctacagcctgtacagcagagagagatacatctgcaacagcggctttaagagaaaggccggcacctcttctctgacagagtgcgtgctgaataaggccacaaatgtggcccactggacaacacctagcctgaagtgcattagagatcctgccctggtccaccagaggcctgcccctccatctacagtgacaacagccggagtgacacctcagcctgaatctctgagcccttctggaaaagaacctgccgccagctctcctagctctaataataccgccgccacaacagccgccattgtgcctggatctcagctgatgcctagcaagtctcctagcacaggcacaacagagatcagcagccacgaatcttctcacggaacaccttctcagaccaccgccaagaattgggagctgacagcctctgcctctcaccagcctccaggagtgtatcctcagggccactctgatacaacagtggccatcagcacatctacagtgctgctgtgtggactgtctgccgtgtctctgctggcctgttacctgaagtctagacagacacctcctctggcctctgtggagatggaggccatggaagccctgcctgtgacatggggaacaagcagcagagatgaggacctggagaattgttctcaccacctg

SEQ ID NO: 210616 - DNA, 711 bp, Artificial Sequence; identical to SEQ ID NO: 210615
  Description of Artificial Sequence: Synthetic Construct

SEQ ID NO: 210617 - protein, 175 aa, Artificial Sequence
  Description of Artificial Sequence: Synthetic Construct
ITCPPPMSVEHADIWVKSYSLYSRERYICNSGFKRKAGTSSLTECVLNKATNVAHWTTPSLKCIRDPALVHQRPAPPSTVTTAGVTPQPESLSPSGKEPAASSPSSNNTAATTAAIVPGSQLMPSKSPSTGTTEISSHESSHGTPSQTTAKNWELTASASHQPPGVYPQGHSDTT

SEQ ID NO: 210618 - DNA, 525 bp, Artificial Sequence
  Description of Artificial Sequence: Synthetic Construct
attacctgcccccctccgatgagcgtggagcacgccgacatctgggtcaagagctacagcttgtatagtagggagcggtacatctgtaacagcgggttcaagaggaaggccgggaccagctcactgaccgagtgcgtgttgaacaaggccaccaacgtggcccactggaccacccctagccttaagtgcatcagggacccagcgctcgtacaccagagacccgcgcctccctctacggtaaccacggcaggcgtaaccccccagcccgagagcctgtccccgagcggcaaggagcctgcagcgagcagcccctcaagcaacaacacagccgctaccaccgcggcaatcgtgcccggcagccagctgatgccctcaaagagccccagcaccggcaccactgagataagcagccacgagagctcacacggcactccctcacagaccactgccaagaattgggagctgaccgcctctgccagccaccagcccccaggcgtgtatccccagggccacagcgacaccacg

SEQ ID NO: 210619 - protein, 61 aa, Homo sapiens
CPPPMSVEHADIWVKSYSLYSRERYICNSGFKRKAGTSSLTECVLNKATNVAHWTTPSLKC

SEQ ID NO: 210620 - protein, 65 aa, Homo sapiens
ITCPPPMSVEHADIWVKSYSLYSRERYICNSGFKRKAGTSSLTECVLNKATNVAHWTTPSLKCIR

SEQ ID NO: 210621 - DNA, 195 bp, Artificial Sequence
  Description of Artificial Sequence: Synthetic CD19 mutant sequence
attacctgcccccctccgatgagcgtggagcacgccgacatctgggtcaagagctacagcttgtatagtagggagcggtacatctgtaacagcgggttcaagaggaaggccgggaccagctcactgaccgagtgcgtgttgaacaaggccaccaacgtggcccactggaccacccctagccttaagtgcatcagg

SEQ ID NO: 210622 - protein, 133 aa, Homo sapiens [sequence omitted]

SEQ ID NO: 210623 - DNA, 399 bp, Artificial Sequence
  Description of Artificial Sequence: Synthetic Construct
gcgccaactagtagcagcacaaaaaagacacagcttcaactggagcacctgctgctggacctgcagatgatccttaacggaatcaacaactacaagaaccccaagctgaccaggatgctgacgtttaagttttacatgcccaagaaggccaccgaactcaaacacctgcaatgcctggaggaagagctgaaaccgcttgaggaagtgttgaacctggcccaaagcaagaatttccacctgaggcccagggacctgataagcaacatcaacgtgatcgtgctggaactgaagggtagcgagaccaccttcatgtgcgagtacgccgacgagaccgcaaccatcgtggagttcctgaaccgatggataacattctgccagagcatcattagcactctgacc

SEQ ID NO: 210624 - DNA, 399 bp, Artificial Sequence
  Description of Artificial Sequence: Synthetic Construct
gcacctacttcaagttctacaaagaaaacacagctacaactggagcatttactgctggatttacagatgattttgaatggaattaataattacaagaatcccaaactcaccaggatgctcacatttaagttttacatgcccaagaaggccacagaactgaaacatcttcagtgtctagaagaagaactcaaacctctggaggaagtgctaaatttagctcaaagcaaaaactttcacttaagacccagggacttaatcagcaatatcaacgtaatagttctggaactaaagggatctgaaacaacattcatgtgtgaatatgctgatgagacagcaaccattgtagaatttctgaacagatggattaccttttgtcaaagcatcatctcaacactgact

SEQ ID NO: 210625 - DNA, 1248 bp, Artificial Sequence
  Description of Artificial Sequence: Synthetic Construct
atggacgaagcggatcggcggctcctgcggcggtgccggctgcggctggtggaagagctgcaggtggaccagctctgggacgccctgctgagccgcgagctgttcaggccccatatgatcgaggacatccagcgggcaggctctggatctcggcgggatcaggccaggcagctgatcatagatctggagactcgagggagtcaggctcttcctttgttcatctcctgcttagaggacacaggccaggacatgctggcttcgtttctgcgaactaacaggcaagcagcaaagttgtcgaagccaaccctagaaaaccttaccccagtggtgctcagaccagagattcgcaaaccagaggttctcagaccggaaacacccagaccagtggacattggttctggaggatttggtgatgtcggtgctcttgagagtttgaggggaaatgcagatttggcttacatcctgagcatggagccctgtggccactgcctcattatcaacaatgtgaacttctgccgtgagtccgggctccgcacccgcactggctccaacatcgactgtgagaagttgcggcgtcgcttctcctcgctgcatttcatggtggaggtgaagggcgacctgactgccaagaaaatggtgctggctttgctggagctggcgcagcaggaccacggtgctctggactgctgcgtggtggtcattctctctcacggctgtcaggccagccacctgcagttcccaggggctgtctacggcacagatggatgccctgtgtcggtcgagaagattgtgaacatcttcaatgggaccagctgccccagcctgggagggaagcccaagctctttttcatccaggcctgtggtggggagcagaaagaccatgggtttgaggtggcctccacttcccctgaagacgagtcccctggcagtaaccccgagccagatgccaccccgttccaggaaggtttgaggaccttcgaccagctggacgccatatctagtttgcccacacccagtgacatctttgtgtcctactctactttcccaggttttgtttcctggagggaccccaagagtggctcctggtacgttgagaccctggacgacatctttgagcagtgggctcactctgaagacctgcagtccctcctgcttagggtcgctaatgctgtttcggtgaaagggatttataaacagatgcctggttgctttaatttcctccggaaaaaacttttctttaaaacatca

SEQ ID NO: 210626 - DNA, 1248 bp, Artificial Sequence
  Description of Artificial Sequence: Synthetic Construct
atggacgaggccgacagaaggcttttgagaaggtgcaggctccggctggttgaggagctgcaagtcgaccaactgtgggacgccctgctgtccagggaactgtttaggccccacatgatcgaggacatccaaagagccgggtcaggatctaggagggatcaggctaggcaacttattatcgatctggaaaccagggggagccaagcccttcccctcttcatcagctgtctcgaggatacgggccaagacatgctcgccagttttctgagaacgaaccgacaggccgcaaagctgagtaaacccaccctggagaaccttacccctgtggtactcaggcccgaaatccggaagcccgaggtgctgaggccggagactccgaggcccgtggacatcggcagtggggggttcggtgacgtgggagcgctggaaagcctgcgcggcaacgctgacctcgcctacatccttagcatggagccgtgcggacactgtctgatcatcaacaacgtgaacttctgcagggagagcgggctgcggaccaggaccgggagcaatatcgattgcgaaaaactgaggaggaggttcagctcactgcacttcatggtggaggtgaagggcgacctgaccgccaagaagatggttctggccttgcttgagcttgcgcagcaagatcacggtgcccttgactgttgtgtggtggtgatactgagccacggctgtcaggccagccacctgcagtttccgggtgctgtctacgggaccgacgggtgccccgtgtctgtcgaaaagatagtgaacatcttcaacggcacgtcctgcccctcactgggcggcaagcccaagctcttctttatacaggcttgcggtggagagcagaaggaccatggcttcgaggtggccagcaccagccccgaggacgagagccctggtagcaatcccgagcccgatgccaccccatttcaagaaggattgaggaccttcgatcagctcgacgcgattagctctctgcccacccccagcgacatttttgtgagctacagcacgttcccgggtttcgtcagttggagggaccctaagagcggaagctggtatgtggagacgctggacgacatattcgagcaatgggcacacagcgaggatctgcagtcactcctgttgcgcgtggccaacgccgtttccgttaagggcatctataagcagatgccaggttgtttcaatttcctccgaaaaaagttgttctttaagaccagc

SEQ ID NO: 210627 - protein, 415 aa, Homo sapiens
DEADRRLLRRCRLRLVEELQVDQLWDALLSRELFRPHMIEDIQRAGSGSRRDQARQLIIDLETRGSQALPLFISCLEDTGQDMLASFLRTNRQAAKLSKPTLENLTPVVLRPEIRKPEVLRPETPRPVDIGSGGFGDVGALESLRGNADLAYILSMEPCGHCLIINNVNFCRESGLRTRTGSNIDCEKLRRRFSSLHFMVEVKGDLTAKKMVLALLELAQQDHGALDCCVVVILSHGCQASHLQFPGAVYGTDGCPVSVEKIVNIFNGTSCPSLGGKPKLFFIQACGGEQKDHGFEVASTSPEDESPGSNPEPDATPFQEGLRTFDQLDAISSLPTPSDIFVSYSTFPGFVSWRDPKSGSWYVETLDDIFEQWAHSEDLQSLLLRVANAVSVKGIYKQMPGCFNFLRKKLFFKTS

SEQ ID NO: 210628 - DNA, 1245 bp, Artificial Sequence
  Description of Artificial Sequence: Synthetic Construct
gacgaagcggatcggcggctcctgcggcggtgccggctgcggctggtggaagagctgcaggtggaccagctctgggacgccctgctgagccgcgagctgttcaggccccatatgatcgaggacatccagcgggcaggctctggatctcggcgggatcaggccaggcagctgatcatagatctggagactcgagggagtcaggctcttcctttgttcatctcctgcttagaggacacaggccaggacatgctggcttcgtttctgcgaactaacaggcaagcagcaaagttgtcgaagccaaccctagaaaaccttaccccagtggtgctcagaccagagattcgcaaaccagaggttctcagaccggaaacacccagaccagtggacattggttctggaggatttggtgatgtcggtgctcttgagagtttgaggggaaatgcagatttggcttacatcctgagcatggagccctgtggccactgcctcattatcaacaatgtgaacttctgccgtgagtccgggctccgcacccgcactggctccaacatcgactgtgagaagttgcggcgtcgcttctcctcgctgcatttcatggtggaggtgaagggcgacctgactgccaagaaaatggtgctggctttgctggagctggcgcagcaggaccacggtgctctggactgctgcgtggtggtcattctctctcacggctgtcaggccagccacctgcagttcccaggggctgtctacggcacagatggatgccctgtgtcggtcgagaagattgtgaacatcttcaatgggaccagctgccccagcctgggagggaagcccaagctctttttcatccaggcctgtggtggggagcagaaagaccatgggtttgaggtggcctccacttcccctgaagacgagtcccctggcagtaaccccgagccagatgccaccccgttccaggaaggtttgaggaccttcgaccagctggacgccatatctagtttgcccacacccagtgacatctttgtgtcctactctactttcccaggttttgtttcctggagggaccccaagagtggctcctggtacgttgagaccctggacgacatctttgagcagtgggctcactctgaagacctgcagtccctcctgcttagggtcgctaatgctgtttcggtgaaagggatttataaacagatgcctggttgctttaatttcctccggaaaaaacttttctttaaaacatca

SEQ ID NO: 210629 - DNA, 1245 bp, Artificial Sequence
  Description of Artificial Sequence: Synthetic Construct
gacgaggccgacagaaggcttttgagaaggtgcaggctccggctggttgaggagctgcaagtcgaccaactgtgggacgccctgctgtccagggaactgtttaggccccacatgatcgaggacatccaaagagccgggtcaggatctaggagggatcaggctaggcaacttattatcgatctggaaaccagggggagccaagcccttcccctcttcatcagctgtctcgaggatacgggccaagacatgctcgccagttttctgagaacgaaccgacaggccgcaaagctgagtaaacccaccctggagaaccttacccctgtggtactcaggcccgaaatccggaagcccgaggtgctgaggccggagactccgaggcccgtggacatcggcagtggggggttcggtgacgtgggagcgctggaaagcctgcgcggcaacgctgacctcgcctacatccttagcatggagccgtgcggacactgtctgatcatcaacaacgtgaacttctgcagggagagcgggctgcggaccaggaccgggagcaatatcgattgcgaaaaactgaggaggaggttcagctcactgcacttcatggtggaggtgaagggcgacctgaccgccaagaagatggttctggccttgcttgagcttgcgcagcaagatcacggtgcccttgactgttgtgtggtggtgatactgagccacggctgtcaggccagccacctgcagtttccgggtgctgtctacgggaccgacgggtgccccgtgtctgtcgaaaagatagtgaacatcttcaacggcacgtcctgcccctcactgggcggcaagcccaagctcttctttatacaggcttgcggtggagagcagaaggaccatggcttcgaggtggccagcaccagccccgaggacgagagccctggtagcaatcccgagcccgatgccaccccatttcaagaaggattgaggaccttcgatcagctcgacgcgattagctctctgcccacccccagcgacatttttgtgagctacagcacgttcccgggtttcgtcagttggagggaccctaagagcggaagctggtatgtggagacgctggacgacatattcgagcaatgggcacacagcgaggatctgcagtcactcctgttgcgcgtggccaacgccgtttccgttaagggcatctataagcagatgccaggttgtttcaatttcctccgaaaaaagttgttctttaagaccagc

SEQ ID NO: 210630 - protein, 285 aa, Homo sapiens
GVDGFGDVGALESLRGNADLAYILSMEPCGHCLIINNVNFCRESGLRTRTGSNIDCEKLRRRFSSLHFMVEVKGDLTAKKMVLALLELARQDHGALDCCVVVILSHGCQASHLQFPGAVYGTDGCPVSVEKIVNIFNGTSCPSLGGKPKLFFIQACGGEQKDHGFEVASTSPEDESPGSNPEPDATPFQEGLRTFDQLDAISSLPTPSDIFVSYSTFPGFVSWRDPKSGSWYVETLDDIFEQWAHSEDLQSLLLRVANAVSVKGIYKQMPGCFNFLRKKLFFKTS

SEQ ID NO: 210631 - DNA, 855 bp, Homo sapiens
ggcgtggacgggttcggtgacgtgggagcgctggaaagcctgcgcggcaacgctgacctcgcctacatccttagcatggagccgtgcggacactgtctgatcatcaacaacgtgaacttctgcagggagagcgggctgcggaccaggaccgggagcaatatcgattgcgaaaaactgaggaggaggttcagctcactgcacttcatggtggaggtgaagggcgacctgaccgccaagaagatggttctggccttgcttgagcttgcgcggcaagatcacggtgcccttgactgttgtgtggtggtgatactgagccacggctgtcaggccagccacctgcagtttccgggtgctgtctacgggaccgacgggtgccccgtgtctgtcgaaaagatagtgaacatcttcaacggcacgtcctgcccctcactgggcggcaagcccaagctcttctttatacaggcttgcggtggagagcagaaggaccatggcttcgaggtggccagcaccagccccgaggacgagagccctggtagcaatcccgagcccgatgccaccccatttcaagaaggattgaggaccttcgatcagctcgacgcgattagctctctgcccacccccagcgacatttttgtgagctacagcacgttcccgggtttcgtcagttggagggaccctaagagcggaagctggtatgtggagacgctggacgacatattcgagcaatgggcacacagcgaggatctgcagtcactcctgttgcgcgtggccaacgccgtttccgttaagggcatctataagcagatgccaggttgtttcaatttcctccgaaaaaagttgttctttaagaccagc

SEQ ID NO: 210632 - DNA, 1293 bp, Homo sapiens
atgccgaacccaaggccagggaagccctctgctcctagcctggccctcggccccagccctggcgctagcccctcttggagggcggctccgaaggcttccgacctcctgggtgctaggggccctggtggaaccttccaaggcagggatctgcgaggaggggcgcacgcctctagctcaagcctgaacccgatgcccccctcacagctgcaactgcctaccctgccgctcgtcatggtggcccccagcggcgcaagactgggcccgttgccgcacctgcaagccttgctgcaggaccggccacatttcatgcaccagctcagcaccgtggacgcacatgcaaggacacccgtgctgcaagtccaccccctggagagccctgccatgatcagcctgacgccgcccaccaccgcaaccggcgtgttttcactgaaggcaagacccgggctgccaccgggcatcaacgtggccagcctggaatgggtgagcagggagccagcgctcctgtgtaccttcccaaacccatccgccccaagaaaggacagcaccctgtctgccgtgccccaatcatcttacccgctgctggcgaatggcgtatgcaagtggcccggatgtgaaaaggtgttcgaggagccggaagatttcctgaaacattgccaggccgaccacctgttggacgaaaagggaagggcccaatgcctgcttcagagggagatggtgcagagcttggagcaacaactcgtgctcgagaaggagaagctgagcgccatgcaggcacacctcgccggcaagatggccctgaccaaagccagtagcgtagccagctccgacaagggtagctgttgcatcgtggccgcaggaagtcaaggccccgttgtgcccgcctggagcggtccaagggaggcacccgactcactgttcgccgtgaggaggcatctgtggggcagccacggtaacagcacgttccccgagttcctgcataacatggactacttcaagttccacaacatgcggcctccattcacctacgccacactgataaggtgggctatcctggaggctcccgagaagcaaaggaccctgaacgagatctaccactggttcaccaggatgttcgctttctttaggaaccaccccgcgacctggaaaaacgccataaggcataacttgagccttcacaagtgcttcgtgagggtggagagtgagaaaggtgccgtgtggactgtggatgagttggagttccgcaagaagcgaagccaacgacctagcaggtgtagcaatccaacccccggaccc

SEQ ID NO: 210633 - protein, 430 aa, Artificial Sequence
  Description of Artificial Sequence: Synthetic polypeptide
PNPRPGKPSAPSLALGPSPGASPSWRAAPKASDLLGARGPGGTFQGRDLRGGAHASSSSLNPMPPSQLQLPTLPLVMVAPSGARLGPLPHLQALLQDRPHFMHQLSTVDAHARTPVLQVHPLESPAMISLTPPTTATGVFSLKARPGLPPGINVASLEWVSREPALLCTFPNPSAPRKDSTLSAVPQSSYPLLANGVCKWPGCEKVFEEPEDFLKHCQADHLLDEKGRAQCLLQREMVQSLEQQLVLEKEKLSAMQAHLAGKMALTKASSVASSDKGSCCIVAAGSQGPVVPAWSGPREAPDSLFAVRRHLWGSHGNSTFPEFLHNMDYFKFHNMRPPFTYATLIRWAILEAPEKQRTLNEIYHWFTRMFAFFRNHPATWKNAIRHNLSLHKCFVRVESEKGAVWTVDELEFRKKRSQRPSRCSNPTPGP

SEQ ID NO: 210634 - DNA, 1290 bp, Artificial Sequence
  Description of Artificial Sequence: Synthetic polynucleotide
ccgaacccaaggccagggaagccctctgctcctagcctggccctcggccccagccctggcgctagcccctcttggagggcggctccgaaggcttccgacctcctgggtgctaggggccctggtggaaccttccaaggcagggatctgcgaggaggggcgcacgcctctagctcaagcctgaacccgatgcccccctcacagctgcaactgcctaccctgccgctcgtcatggtggcccccagcggcgcaagactgggcccgttgccgcacctgcaagccttgctgcaggaccggccacatttcatgcaccagctcagcaccgtggacgcacatgcaaggacacccgtgctgcaagtccaccccctggagagccctgccatgatcagcctgacgccgcccaccaccgcaaccggcgtgttttcactgaaggcaagacccgggctgccaccgggcatcaacgtggccagcctggaatgggtgagcagggagccagcgctcctgtgtaccttcccaaacccatccgccccaagaaaggacagcaccctgtctgccgtgccccaatcatcttacccgctgctggcgaatggcgtatgcaagtggcccggatgtgaaaaggtgttcgaggagccggaagatttcctgaaacattgccaggccgaccacctgttggacgaaaagggaagggcccaatgcctgcttcagagggagatggtgcagagcttggagcaacaactcgtgctcgagaaggagaagctgagcgccatgcaggcacacctcgccggcaagatggccctgaccaaagccagtagcgtagccagctccgacaagggtagctgttgcatcgtggccgcaggaagtcaaggccccgttgtgcccgcctggagcggtccaagggaggcacccgactcactgttcgccgtgaggaggcatctgtggggcagccacggtaacagcacgttccccgagttcctgcataacatggactacttcaagttccacaacatgcggcctccattcacctacgccacactgataaggtgggctatcctggaggctcccgagaagcaaaggaccctgaacgagatctaccactggttcaccaggatgttcgctttctttaggaaccaccccgcgacctggaaaaacgccataaggcataacttgagccttcacaagtgcttcgtgagggtggagagtgagaaaggtgccgtgtggactgtggatgagttggagttccgcaagaagcgaagccaacgacctagcaggtgtagcaatccaacccccggaccc

SEQ ID NO: 210635 - DNA, 1188 bp, Homo sapiens
atgccgaacccaaggccagggaagccctctgctcctagcctggccctcggccccagccctggcgctagcccctcttggagggcggctccgaaggcttccgacctcctgggtgctaggggccctggtggaaccttccaaggcagggatctgcgaggaggggcgcacgcctctagctcaagcctgaacccgatgcccccctcacagctgcagctcagcaccgtggacgcacatgcaaggacacccgtgctgcaagtccaccccctggagagccctgccatgatcagcctgacgccgcccaccaccgcaaccggcgtgttttcactgaaggcaagacccgggctgccaccgggcatcaacgtggccagcctggaatgggtgagcagggagccagcgctcctgtgtaccttcccaaacccatccgccccaagaaaggacagcaccctgtctgccgtgccccaatcatcttacccgctgctggcgaatggcgtatgcaagtggcccggatgtgaaaaggtgttcgaggagccggaagatttcctgaaacattgccaggccgaccacctgttggacgaaaagggaagggcccaatgcctgcttcagagggagatggtgcagagcttggagcaacaactcgtgctcgagaaggagaagctgagcgccatgcaggcacacctcgccggcaagatggccctgaccaaagccagtagcgtagccagctccgacaagggtagctgttgcatcgtggccgcaggaagtcaaggccccgttgtgcccgcctggagcggtccaagggaggcacccgactcactgttcgccgtgaggaggcatctgtggggcagccacggtaacagcacgttccccgagttcctgcataacatggactacttcaagttccacaacatgcggcctccattcacctacgccacactgataaggtgggctatcctggaggctcccgagaagcaaaggaccctgaacgagatctaccactggttcaccaggatgttcgctttctttaggaaccaccccgcgacctggaaaaacgccataaggcataacttgagccttcacaagtgcttcgtgagggtggagagtgagaaaggtgccgtgtggactgtggatgagttggagttccgcaagaagcgaagccaacgacctagcaggtgtagcaatccaacccccggaccc

SEQ ID NO: 210636 - protein, 395 aa, Artificial Sequence
  Description of Artificial Sequence: Synthetic polypeptide
PNPRPGKPSAPSLALGPSPGASPSWRAAPKASDLLGARGPGGTFQGRDLRGGAHASSSSLNPMPPSQLQLSTVDAHARTPVLQVHPLESPAMISLTPPTTATGVFSLKARPGLPPGINVASLEWVSREPALLCTFPNPSAPRKDSTLSAVPQSSYPLLANGVCKWPGCEKVFEEPEDFLKHCQADHLLDEKGRAQCLLQREMVQSLEQQLVLEKEKLSAMQAHLAGKMALTKASSVASSDKGSCCIVAAGSQGPVVPAWSGPREAPDSLFAVRRHLWGSHGNSTFPEFLHNMDYFKFHNMRPPFTYATLIRWAILEAPEKQRTLNEIYHWFTRMFAFFRNHPATWKNAIRHNLSLHKCFVRVESEKGAVWTVDELEFRKKRSQRPSRCSNPTPGP

SEQ ID NO: 210637 - DNA, 1185 bp, Artificial Sequence
  Description of Artificial Sequence: Synthetic polynucleotide
ccgaacccaaggccagggaagccctctgctcctagcctggccctcggccccagccctggcgctagcccctcttggagggcggctccgaaggcttccgacctcctgggtgctaggggccctggtggaaccttccaaggcagggatctgcgaggaggggcgcacgcctctagctcaagcctgaacccgatgcccccctcacagctgcagctcagcaccgtggacgcacatgcaaggacacccgtgctgcaagtccaccccctggagagccctgccatgatcagcctgacgccgcccaccaccgcaaccggcgtgttttcactgaaggcaagacccgggctgccaccgggcatcaacgtggccagcctggaatgggtgagcagggagccagcgctcctgtgtaccttcccaaacccatccgccccaagaaaggacagcaccctgtctgccgtgccccaatcatcttacccgctgctggcgaatggcgtatgcaagtggcccggatgtgaaaaggtgttcgaggagccggaagatttcctgaaacattgccaggccgaccacctgttggacgaaaagggaagggcccaatgcctgcttcagagggagatggtgcagagcttggagcaacaactcgtgctcgagaaggagaagctgagcgccatgcaggcacacctcgccggcaagatggccctgaccaaagccagtagcgtagccagctccgacaagggtagctgttgcatcgtggccgcaggaagtcaaggccccgttgtgcccgcctggagcggtccaagggaggcacccgactcactgttcgccgtgaggaggcatctgtggggcagccacggtaacagcacgttccccgagttcctgcataacatggactacttcaagttccacaacatgcggcctccattcacctacgccacactgataaggtgggctatcctggaggctcccgagaagcaaaggaccctgaacgagatctaccactggttcaccaggatgttcgctttctttaggaaccaccccgcgacctggaaaaacgccataaggcataacttgagccttcacaagtgcttcgtgagggtggagagtgagaaaggtgccgtgtggactgtggatgagttggagttccgcaagaagcgaagccaacgacctagcaggtgtagcaatccaacccccggaccc

SEQ ID NO: 210638 - protein, 235 aa, Artificial Sequence
  Description of Artificial Sequence: Synthetic polypeptide
MSKGEEDNMAIIKEFMRFKVHMEGSVNGHEFEIEGEGEGRPYEGTQTAKLKVTKGGPLPFAWDILSPQFMYGSKAYVKHPADIPDYLKLSFPEGFKWERVMNFEDGGVVTVTQDSSLQDGEFIYKVKLRGTNFPSDGPVMQKKTMGWEASSERMYPEDGALKGEIKQRLKLKDGGHYDAEVKTTYKAKKPVQLPGAYNVNIKLDITSHNEDYTIVEQYERAEGRHSTGGMDELYK

SEQ ID NO: 210639 - DNA, 705 bp, Artificial Sequence
  Description of Artificial Sequence: Synthetic polynucleotide
atgagcaagggcgaggaggataacatggccatcatcaaggagttcatgcgcttcaaggtgcacatggagggctccgtgaacggccacgagttcgagatcgagggcgagggcgagggccgcccctacgagggcacccagaccgccaagctgaaggtgaccaagggtggccccctgcccttcgcctgggacatcctgtcccctcagttcatgtacggctccaaggcctacgtgaagcaccccgccgacatccccgactacttgaagctgtccttccccgagggcttcaagtgggagcgcgtgatgaacttcgaggacggcggcgtggtgaccgtgacccaggactcctccctgcaggacggcgagttcatctacaaggtgaagctgcgcggcaccaacttcccctccgacggccccgtaatgcagaagaagaccatgggctgggaggcctcctccgagcggatgtaccccgaggacggcgccctgaagggcgagatcaagcagaggctgaagctgaaggacggcggccactacgacgctgaggtcaagaccacctacaaggccaagaagcccgtgcagctgcccggcgcctacaacgtcaacatcaagttggacatcacctcccacaacgaggactacaccatcgtggaacagtacgaacgcgccgagggccgccactccaccggcggcatggacgagctgtacaag

SEQ ID NO: 210640 - protein, 235 aa, Artificial Sequence
  Description of Artificial Sequence: Synthetic polypeptide
LSKGEEDNMAIIKEFMRFKVHMEGSVNGHEFEIEGEGEGRPYEGTQTAKLKVTKGGPLPFAWDILSPQFMYGSKAYVKHPADIPDYLKLSFPEGFKWERVMNFEDGGVVTVTQDSSLQDGEFIYKVKLRGTNFPSDGPVMQKKTMGWEASSERMYPEDGALKGEIKQRLKLKDGGHYDAEVKTTYKAKKPVQLPGAYNVNIKLDITSHNEDYTIVEQYERAEGRHSTGGMDELYK

SEQ ID NO: 210641 - DNA, 705 bp, Artificial Sequence
  Description of Artificial Sequence: Synthetic polynucleotide
ttgagcaagggcgaggaggacaacatggccatcatcaaggagttcatgcgcttcaaggtgcacatggagggctccgtgaacggccacgagttcgagatcgagggcgagggcgagggccgcccctacgagggcacccagaccgccaagctgaaggtgaccaagggcggccccctgcccttcgcctgggacatcctgtcccctcagttcatgtacggctccaaggcctacgtgaagcaccccgccgacatccccgactacttgaagctgtccttccccgagggcttcaagtgggagcgcgtgatgaacttcgaggacggcggcgtggtgaccgtgacccaggactcctccctgcaggacggcgagttcatctacaaggtgaagctgcgcggcaccaacttcccctccgacggccccgtaatgcagaagaagaccatgggctgggaggcctcctccgagcggatgtaccccgaggacggcgccctgaagggcgagatcaagcagaggctgaagctgaaggacggcggccactacgacgccgaggtcaagaccacctacaaggccaagaagcccgtgcagctgcccggcgcctacaacgtcaacatcaagctggacatcacctcccacaacgaggactacaccatcgtggaacagtacgagcgcgccgagggccgccactccaccggcggcatggacgagctgtacaag

SEQ ID NO: 210642 - DNA, 705 bp, Artificial Sequence
  Description of Artificial Sequence: Synthetic polynucleotide
ttgagcaagggcgaggaggataacatggccatcatcaaggagttcatgcgcttcaaggtgcacatggagggctccgtgaacggccacgagttcgagatcgagggcgagggcgagggccgcccctacgagggcacccagaccgccaagctgaaggtgaccaagggtggccccctgcccttcgcctgggacatcctgtcccctcagttcatgtacggctccaaggcctacgtgaagcaccccgccgacatccccgactacttgaagctgtccttccccgagggcttcaagtgggagcgcgtgatgaacttcgaggacggcggcgtggtgaccgtgacccaggactcctccctgcaggacggcgagttcatctacaaggtgaagctgcgcggcaccaacttcccctccgacggccccgtaatgcagaagaagaccatgggctgggaggcctcctccgagcggatgtaccccgaggacggcgccctgaagggcgagatcaagcagaggctgaagctgaaggacggcggccactacgacgctgaggtcaagaccacctacaaggccaagaagcccgtgcagctgcccggcgcctacaacgtcaacatcaagttggacatcacctcccacaacgaggactacaccatcgtggaacagtacgaacgcgccgagggccgccactccaccggcggcatggacgagctgtacaag

SEQ ID NO: 210643 - protein, 311 aa, Renilla reniformis
MTSKVYDPEQRKRMITGPQWWARCKQMNVLDSFINYYDSEKHAENAVIFLHGNAASSYLWRHVVPHIEPVARCIIPDLIGMGKSGKSGNGSYRLLDHYKYLTAWFELLNLPKKIIFVGHDWGACLAFHYSYEHQDKIKAIVHAESVVDVIESWDEWPDIEEDIALIKSEEGEKMVLENNFFVETMLPSKIMRKLEPEEFAAYLEPFKEKGEVRRPTLSWPREIPLVKGGKPDVVQIVRNYNAYLRASDDLPKMFIESDPGFFSNAIVEGAKKFPNTEFVKVKGLHFSQEDAPDEMGKYIKSFVERVLKNEQ

SEQ ID NO: 210644 - DNA, 933 bp, Renilla reniformis
atgacttccaaggtgtacgaccccgagcaacgcaaacgcatgatcactgggcctcagtggtgggctcgctgcaagcaaatgaacgtgctggactccttcatcaactactatgattccgagaagcacgccgagaacgccgtgatttttctgcatggtaacgctgcctccagctacctgtggaggcacgtcgtgcctcacatcgagcccgtggctagatgcatcatccctgatctgatcggaatgggtaagtccggcaagagcgggaatggctcatatcgcctcctggatcactacaagtacctcaccgcttggttcgagctgctgaaccttccaaagaaaatcatctttgtgggccacgactggggggcttgtctggcctttcactactcctacgagcaccaagacaagatcaaggccatcgtccatgctgagagtgtcgtggacgtgatcgagtcctgggacgagtggcctgacatcgaggaggatatcgccctgatcaagagcgaagagggcgagaaaatggtgcttgagaataacttcttcgtcgagaccatgctcccaagcaagatcatgcggaaactggagcctgaggagttcgctgcctacctggagccattcaaggagaagggcgaggttagacggcctaccctctcctggcctcgcgagatccctctcgttaagggaggcaagcccgacgtcgtccagattgtccgcaactacaacgcctaccttcgggccagcgacgatctgcctaagatgttcatcgagtccgaccctgggttcttttccaacgctattgtcgagggagctaagaagttccctaacaccgagttcgtgaaggtgaagggcctccacttcagccaggaggacgctccagatgaaatgggtaagtacatcaagagcttcgtggagcgcgtgctgaagaacgagcag

SEQ ID NO: 210645 - protein, 310 aa, Renilla reniformis
TSKVYDPEQRKRMITGPQWWARCKQMNVLDSFINYYDSEKHAENAVIFLHGNAASSYLWRHVVPHIEPVARCIIPDLIGMGKSGKSGNGSYRLLDHYKYLTAWFELLNLPKKIIFVGHDWGACLAFHYSYEHQDKIKAIVHAESVVDVIESWDEWPDIEEDIALIKSEEGEKMVLENNFFVETMLPSKIMRKLEPEEFAAYLEPFKEKGEVRRPTLSWPREIPLVKGGKPDVVQIVRNYNAYLRASDDLPKMFIESDPGFFSNAIVEGAKKFPNTEFVKVKGLHFSQEDAPDEMGKYIKSFVERVLKNEQ

SEQ ID NO: 210646 - DNA, 930 bp, Renilla reniformis
acttccaaggtgtacgaccccgagcaacgcaaacgcatgatcactgggcctcagtggtgggctcgctgcaagcaaatgaacgtgctggactccttcatcaactactatgattccgagaagcacgccgagaacgccgtgatttttctgcatggtaacgctgcctccagctacctgtggaggcacgtcgtgcctcacatcgagcccgtggctagatgcatcatccctgatctgatcggaatgggtaagtccggcaagagcgggaatggctcatatcgcctcctggatcactacaagtacctcaccgcttggttcgagctgctgaaccttccaaagaaaatcatctttgtgggccacgactggggggcttgtctggcctttcactactcctacgagcaccaagacaagatcaaggccatcgtccatgctgagagtgtcgtggacgtgatcgagtcctgggacgagtggcctgacatcgaggaggatatcgccctgatcaagagcgaagagggcgagaaaatggtgcttgagaataacttcttcgtcgagaccatgctcccaagcaagatcatgcggaaactggagcctgaggagttcgctgcctacctggagccattcaaggagaagggcgaggttagacggcctaccctctcctggcctcgcgagatccctctcgttaagggaggcaagcccgacgtcgtccagattgtccgcaactacaacgcctaccttcgggccagcgacgatctgcctaagatgttcatcgagtccgaccctgggttcttttccaacgctattgtcgagggagctaagaagttccctaacaccgagttcgtgaaggtgaagggcctccacttcagccaggaggacgctccagatgaaatgggtaagtacatcaagagcttcgtggagcgcgtgctgaagaacgagcag

SEQ ID NO: 210647 - protein, 550 aa, Photinus pyralis
MEDAKNIKKGPAPFYPLEDGTAGEQLHKAMKRYALVPGTIAFTDAHIEVNITYAEYFEMSVRLAEAMKRYGLNTNHRIVVCSENSLQFFMPVLGALFIGVAVAPANDIYNERELLNSMNISQPTVVFVSKKGLQKILNVQKKLPIIQKIIIMDSKTDYQGFQSMYTFVTSHLPPGFNEYDFVPESFDRDKTIALIMNSSGSTGLPKGVALPHRTACVRFSHARDPIFGNQIIPDTAILSVVPFHHGFGMFTTLGYLICGFRVVLMYRFEEELFLRSLQDYKIQSALLVPTLFSFFAKSTLIDKYDLSNLHEIASGGAPLSKEVGEAVAKRFHLPGIRQGYGLTETTSAILITPEGDDKPGAVGKVVPFFEAKVVDLDTGKTLGVNQRGELCVRGPMIMSGYVNNPEATNALIDKDGWLHSGDIAYWDEDEHFFIVDRLKSLIKYKGYQVAPAELESILLQHPNIFDAGVAGLPDDDAGELPAAVVVLEHGKTMTEKEIVDYVASQVTTAKKLRGGVVFVDEVPKGLTGKLDARKIREILIKAKKGGKSKL

SEQ ID NO: 210648 - protein, 550 aa, Artificial Sequence
  Description of Artificial Sequence: Synthetic Payload  sequence
MEDAKNIKKGPAPFYPLEDGTAGEQLHKAMKRYALVPGTIAFTDAHIEVDITYAEYFEMSVRLAEAMKRYGLNTNHRIVVCSENSLQFFMPVLGALFIGVAVAPANDIYNERELLNSMGISQPTVVFVSKKGLQKILNVQKKLPIIQKIIIMDSKTDYQGFQSMYTFVTSHLPPGFNEYDFVPESFDRDKTIALIMNSSGSTGLPKGVALPHRTACVRFSHARDPIFGNQIIPDTAILSVVPFHHGFGMFTTLGYLICGFRVVLMYRFEEELFLRSLQDYKIQSALLVPTLFSFFAKSTLIDKYDLSNLHEIASGGAPLSKEVGEAVAKRFHLPGIRQGYGLTETTSAILITPEGDDKPGAVGKVVPFFEAKVVDLDTGKTLGVNQRGELCVRGPMIMSGYVNNPEATNALIDKDGWLHSGDIAYWDEDEHFFIVDRLKSLIKYKGYQVAPAELESILLQHPNIFDAGVAGLPDDDAGELPAAVVVLEHGKTMTEKEIVDYVASQVTTAKKLRGGVVFVDEVPKGLTGKLDARKIREILIKAKKGGKSKL

SEQ ID NO: 210649 - DNA, 1650 bp, Artificial Sequence
  Description of Artificial Sequence: Synthetic Payload  sequence
atggaagatgccaaaaacattaagaagggcccagcgccattctacccactcgaagacgggaccgccggcgagcagctgcacaaagccatgaagcgctacgccctggtgcccggcaccatcgcctttaccgacgcacatatcgaggtggacattacctacgccgagtacttcgagatgagcgttcggctggcagaagctatgaagcgctatgggctgaatacaaaccatcggatcgtggtgtgcagcgagaatagcttgcagttcttcatgcccgtgttgggtgccctgttcatcggtgtggctgtggccccagctaacgacatctacaacgagcgcgagctgctgaacagcatgggcatcagccagcccaccgtcgtattcgtgagcaagaaagggctgcaaaagatcctcaacgtgcaaaagaagctaccgatcatacaaaagatcatcatcatggatagcaagaccgactaccagggcttccaaagcatgtacaccttcgtgacttcccatttgccacccggcttcaacgagtacgacttcgtgcccgagagcttcgaccgggacaaaaccatcgccctgatcatgaacagtagtggcagtaccggattgcccaagggcgtagccctaccgcaccgcaccgcttgtgtccgattcagtcatgcccgcgaccccatcttcggcaaccagatcatccccgacaccgctatcctcagcgtggtgccatttcaccacggcttcggcatgttcaccacgctgggctacttgatctgcggctttcgggtcgtgctcatgtaccgcttcgaggaggagctattcttgcgcagcttgcaagactataagattcaatctgccctgctggtgcccacactatttagcttcttcgctaagagcactctcatcgacaagtacgacctaagcaacttgcacgagatcgccagcggcggggcgccgctcagcaaggaggtaggtgaggccgtggccaaacgcttccacctaccaggcatccgccagggctacggcctgacagaaacaaccagcgccattctgatcacccccgaaggggacgacaagcctggcgcagtaggcaaggtggtgcccttcttcgaggctaaggtggtggacttggacaccggtaagacactgggtgtgaaccagcgcggcgagctgtgcgtccgtggccccatgatcatgagcggctacgttaacaaccccgaggctacaaacgctctcatcgacaaggacggctggctgcacagcggcgacatcgcctactgggacgaggacgagcacttcttcatcgtggaccggctgaagagcctgatcaaatacaagggctaccaggtagccccagccgaactggagagcatcctgctgcaacaccccaacatcttcgacgccggggtcgccggcctgcccgacgacgatgccggcgagctgcccgccgcagtcgtcgtgctggaacacggtaaaaccatgaccgagaaggagatcgtggactatgtggccagccaggttacaaccgccaagaagctgcgcggtggtgttgtgttcgtggacgaggtgcctaaaggactgaccggcaagttggacgcccgcaagatccgcgagattctcattaaggccaagaagggcggcaagagcaagctg

SEQ ID NO: 210650 - protein, 550 aa, Artificial Sequence
  Description of Artificial Sequence: Synthetic Payload  sequence
MEDAKNIKKGPAPFYPLEDGTAGEQLHKAMKRYALVPGTIAFTDAHIEVDITYAEYFEMSVRLAEAMKRYGLNTNHRIVVCSENSLQFFMPVLGALFIGVAVAPANDIYNERELLNSMGISQPTVVFVSKKGLQKILNVQKKLPIIQKIIIMDSKTDYQGFQSMYTFVTSHLPPGFNEYDFVPESFDRDKTIALIMNSSGSTGLPKGVALPHRTACVRFSHARDPIFGNQIIPDTAILSVVPFHHGFGMFTTLGYLICGFRVVLMYRFEEELFLRSLQDYKIQSALLVPTLFSFFAKSTLIDKYDLSNLHEIASGGAPLSKEVGEAVAKRFHLPGIRQGYGLTETTSAILITPEGDDKPGAVGKVVPFFEAKVVDLDTGKTLGVNQRGELCVRGPMIMSGYVNNPEATNALIDKDGWLHSGDIAYWDEDEHFFIVDRLKSLIKYKGYQVAPAELESILLQHPNIFDAGVAGLPDDDAGELPAAVVVLEHGKTMTEKEIVDYVASQVTTAKKLRGGVVFVDEVPKGLTGKLDARKIREILIKAKKGGKIAV

SEQ ID NO: 210651 - DNA, 1650 bp, Artificial Sequence
  Description of Artificial Sequence: Synthetic Payload  sequence
atggaagatgccaaaaacattaagaagggcccagcgccattctacccactcgaagacgggaccgccggcgagcagctgcacaaagccatgaagcgctacgccctggtgcccggcaccatcgcctttaccgacgcacatatcgaggtggacattacctacgccgagtacttcgagatgagcgttcggctggcagaagctatgaagcgctatgggctgaatacaaaccatcggatcgtggtgtgcagcgagaatagcttgcagttcttcatgcccgtgttgggtgccctgttcatcggtgtggctgtggccccagctaacgacatctacaacgagcgcgagctgctgaacagcatgggcatcagccagcccaccgtcgtattcgtgagcaagaaagggctgcaaaagatcctcaacgtgcaaaagaagctaccgatcatacaaaagatcatcatcatggatagcaagaccgactaccagggcttccaaagcatgtacaccttcgtgacttcccatttgccacccggcttcaacgagtacgacttcgtgcccgagagcttcgaccgggacaaaaccatcgccctgatcatgaacagtagtggcagtaccggattgcccaagggcgtagccctaccgcaccgcaccgcttgtgtccgattcagtcatgcccgcgaccccatcttcggcaaccagatcatccccgacaccgctatcctcagcgtggtgccatttcaccacggcttcggcatgttcaccacgctgggctacttgatctgcggctttcgggtcgtgctcatgtaccgcttcgaggaggagctattcttgcgcagcttgcaagactataagattcaatctgccctgctggtgcccacactatttagcttcttcgctaagagcactctcatcgacaagtacgacctaagcaacttgcacgagatcgccagcggcggggcgccgctcagcaaggaggtaggtgaggccgtggccaaacgcttccacctaccaggcatccgccagggctacggcctgacagaaacaaccagcgccattctgatcacccccgaaggggacgacaagcctggcgcagtaggcaaggtggtgcccttcttcgaggctaaggtggtggacttggacaccggtaagacactgggtgtgaaccagcgcggcgagctgtgcgtccgtggccccatgatcatgagcggctacgttaacaaccccgaggctacaaacgctctcatcgacaaggacggctggctgcacagcggcgacatcgcctactgggacgaggacgagcacttcttcatcgtggaccggctgaagagcctgatcaaatacaagggctaccaggtagccccagccgaactggagagcatcctgctgcaacaccccaacatcttcgacgccggggtcgccggcctgcccgacgacgatgccggcgagctgcccgccgcagtcgtcgtgctggaacacggtaaaaccatgaccgagaaggagatcgtggactatgtggccagccaggttacaaccgccaagaagctgcgcggtggtgttgtgttcgtggacgaggtgcctaaaggactgaccggcaagttggacgcccgcaagatccgcgagattctcattaaggccaagaagggcggcaagatcgccgtg

SEQ ID NO: 210652 - protein, 549 aa, Artificial Sequence
  Description of Artificial Sequence: Synthetic Payload  sequence
EDAKNIKKGPAPFYPLEDGTAGEQLHKAMKRYALVPGTIAFTDAHIEVDITYAEYFEMSVRLAEAMKRYGLNTNHRIVVCSENSLQFFMPVLGALFIGVAVAPANDIYNERELLNSMGISQPTVVFVSKKGLQKILNVQKKLPIIQKIIIMDSKTDYQGFQSMYTFVTSHLPPGFNEYDFVPESFDRDKTIALIMNSSGSTGLPKGVALPHRTACVRFSHARDPIFGNQIIPDTAILSVVPFHHGFGMFTTLGYLICGFRVVLMYRFEEELFLRSLQDYKIQSALLVPTLFSFFAKSTLIDKYDLSNLHEIASGGAPLSKEVGEAVAKRFHLPGIRQGYGLTETTSAILITPEGDDKPGAVGKVVPFFEAKVVDLDTGKTLGVNQRGELCVRGPMIMSGYVNNPEATNALIDKDGWLHSGDIAYWDEDEHFFIVDRLKSLIKYKGYQVAPAELESILLQHPNIFDAGVAGLPDDDAGELPAAVVVLEHGKTMTEKEIVDYVASQVTTAKKLRGGVVFVDEVPKGLTGKLDARKIREILIKAKKGGKIAV

SEQ ID NO: 210653 - DNA, 1647 bp, Artificial Sequence
  Description of Artificial Sequence: Synthetic Payload  sequence
gaagatgccaaaaacattaagaagggcccagcgccattctacccactcgaagacgggaccgccggcgagcagctgcacaaagccatgaagcgctacgccctggtgcccggcaccatcgcctttaccgacgcacatatcgaggtggacattacctacgccgagtacttcgagatgagcgttcggctggcagaagctatgaagcgctatgggctgaatacaaaccatcggatcgtggtgtgcagcgagaatagcttgcagttcttcatgcccgtgttgggtgccctgttcatcggtgtggctgtggccccagctaacgacatctacaacgagcgcgagctgctgaacagcatgggcatcagccagcccaccgtcgtattcgtgagcaagaaagggctgcaaaagatcctcaacgtgcaaaagaagctaccgatcatacaaaagatcatcatcatggatagcaagaccgactaccagggcttccaaagcatgtacaccttcgtgacttcccatttgccacccggcttcaacgagtacgacttcgtgcccgagagcttcgaccgggacaaaaccatcgccctgatcatgaacagtagtggcagtaccggattgcccaagggcgtagccctaccgcaccgcaccgcttgtgtccgattcagtcatgcccgcgaccccatcttcggcaaccagatcatccccgacaccgctatcctcagcgtggtgccatttcaccacggcttcggcatgttcaccacgctgggctacttgatctgcggctttcgggtcgtgctcatgtaccgcttcgaggaggagctattcttgcgcagcttgcaagactataagattcaatctgccctgctggtgcccacactatttagcttcttcgctaagagcactctcatcgacaagtacgacctaagcaacttgcacgagatcgccagcggcggggcgccgctcagcaaggaggtaggtgaggccgtggccaaacgcttccacctaccaggcatccgccagggctacggcctgacagaaacaaccagcgccattctgatcacccccgaaggggacgacaagcctggcgcagtaggcaaggtggtgcccttcttcgaggctaaggtggtggacttggacaccggtaagacactgggtgtgaaccagcgcggcgagctgtgcgtccgtggccccatgatcatgagcggctacgttaacaaccccgaggctacaaacgctctcatcgacaaggacggctggctgcacagcggcgacatcgcctactgggacgaggacgagcacttcttcatcgtggaccggctgaagagcctgatcaaatacaagggctaccaggtagccccagccgaactggagagcatcctgctgcaacaccccaacatcttcgacgccggggtcgccggcctgcccgacgacgatgccggcgagctgcccgccgcagtcgtcgtgctggaacacggtaaaaccatgaccgagaaggagatcgtggactatgtggccagccaggttacaaccgccaagaagctgcgcggtggtgttgtgttcgtggacgaggtgcctaaaggactgaccggcaagttggacgcccgcaagatccgcgagattctcattaaggccaagaagggcggcaagatcgccgtg

SEQ ID NO: 210654 - protein, 427 aa, Artificial Sequence
  Description of Artificial Sequence: Synthetic polypeptide
MVSKGAELFTGIVPILIELNGDVNGHKFSVSGEGEGDATYGKLTLKFICTTGKLPVPWPTLVTTLSYGVQCFSRYPDHMKQHDFFKSAMPEGYIQERTIFFEDDGNYKSRAEVKFEGDTLVNRIELTGTDFKEDGNILGNKMEYNYNAHNVYIMTDKAKNGIKVNFKIRHNIEDGSVQLADHYQQNTPIGDGPVLLPDNHYLSTQSALSKDPNEKRDHMIYFGFVTAAAITHGMDELYKGSVGSLNCIVAVSQNMGIGKNGDLPWPPLRNEFRYFQRMTTTSSVEGKQNLVIMGKKTWFSIPEKNRPLKGRINLVLSRELKEPPQGAHFLSRSLDDALKLTEQPELANKVDMVWIVGGSSVIKEAMNHPGHLKLFVTRIMQDFESDTFFPEIDLEKYKLLPEYPGVLSDVQEEKGIKYKFEVYEKND

SEQ ID NO: 210655 - DNA, 1281 bp, Artificial Sequence
  Description of Artificial Sequence: Synthetic polynucleotide
atggtgagcaagggcgccgagctgttcaccggcatcgtgcccatcctgatcgagctgaatggcgatgtgaatggccacaagttcagcgtgagcggcgagggcgagggcgatgccacctacggcaagctgaccctgaagttcatctgcaccaccggcaagctgcctgtgccctggcccaccctggtgaccaccctgagctacggcgtgcagtgcttctcacgctaccccgatcacatgaagcagcacgacttcttcaagagcgccatgcctgagggctacatccaggagcgcaccatcttcttcgaggatgacggcaactacaagtcgcgcgccgaggtgaagttcgagggcgataccctggtgaatcgcatcgagctgaccggcaccgatttcaaggaggatggcaacatcctgggcaataagatggagtacaactacaacgcccacaatgtgtacatcatgaccgacaaggccaagaatggcatcaaggtgaacttcaagatccgccacaacatcgaggatggcagcgtgcagctggccgaccactaccagcagaatacccccatcggcgatggccctgtgctgctgcccgataaccactacctgtccacccagagcgccctgtccaaggaccccaacgagaagcgcgatcacatgatctacttcggcttcgtgaccgccgccgccatcacccacggcatggatgagctgtacaagggatccgttggttcgctaaactgcatcgtcgctgtgtcccagaacatgggcatcggcaagaacggggacctgccctggccaccgctcaggaatgaattcagatatttccagagaatgaccacaacctcttcagtagaaggtaaacagaatctggtgattatgggtaagaagacctggttctccattcctgagaagaatcgacctttaaagggtagaattaatttagttctcagcagagaactcaaggaacctccacaaggagctcattttctttccagaagtctagatgatgccttaaaacttactgaacaaccagaattagcaaataaagtagacatggtctggatagttggtggcagttctgttattaaggaagccatgaatcacccaggccatcttaaactatttgtgacaaggatcatgcaagactttgaaagtgacacgttttttccagaaattgatttggagaaatataaacttctgccagaatacccaggtgttctctctgatgtccaggaggagaaaggcattaagtacaaatttgaagtatatgagaagaatgat

SEQ ID NO: 210656 - protein, 239 aa, Artificial Sequence
  Description of Artificial Sequence: Synthetic polypeptide
MVSKGAELFTGIVPILIELNGDVNGHKFSVSGEGEGDATYGKLTLKFICTTGKLPVPWPTLVTTLSYGVQCFSRYPDHMKQHDFFKSAMPEGYIQERTIFFEDDGNYKSRAEVKFEGDTLVNRIELTGTDFKEDGNILGNKMEYNYNAHNVYIMTDKAKNGIKVNFKIRHNIEDGSVQLADHYQQNTPIGDGPVLLPDNHYLSTQSALSKDPNEKRDHMIYFGFVTAAAITHGMDELYK

SEQ ID NO: 210657 - DNA, 717 bp, Artificial Sequence
  Description of Artificial Sequence: Synthetic polynucleotide
atggtttctaaaggtgcggagctgttcaccggtatcgttccgatcctgatcgaactgaacggtgacgtaaacggtcacaaattctctgtttctggtgaaggcgagggtgacgcgacgtacggtaagctgacgctgaagttcatctgcactaccggcaaactgccggttccgtggccgaccctggttaccaccctctcttacggtgttcagtgcttctctcgttacccggaccatatgaaacagcacgacttcttcaaatctgctatgccggaaggttacatccaggaacgtaccatctttttcgaagacgatggtaactataagtctcgtgcagaggttaaattcgagggcgataccctcgtgaaccgcatcgagctgaccggcactgacttcaaggaagacggtaacatcctgggtaacaaaatggaatacaactacaacgctcacaacgtttacatcatgaccgacaaagccaaaaacggtatcaaggttaacttcaaaatccgtcacaacatcgaggatggttctgttcagctggcggaccactaccagcaaaacacccctatcggcgacggtccggtgctgctgccggacaatcactatctgtccacccagtccgcgctgtctaaagaccctaacgaaaaacgtgaccacatgatctacttcggtttcgtgaccgcagcggcaattacccacggtatggacgaactctacaaa

SEQ ID NO: 210658 - DNA, 717 bp, Artificial Sequence
  Description of Artificial Sequence: Synthetic polynucleotide
atggtgagcaagggcgccgagctgttcaccggcatcgtgcccatcctgatcgagctgaatggcgatgtgaatggccacaagttcagcgtgagcggcgagggcgagggcgatgccacctacggcaagctgaccctgaagttcatctgcaccaccggcaagctgcctgtgccctggcccaccctggtgaccaccctgagctacggcgtgcagtgcttctcacgctaccccgatcacatgaagcagcacgacttcttcaagagcgccatgcctgagggctacatccaggagcgcaccatcttcttcgaggatgacggcaactacaagtcgcgcgccgaggtgaagttcgagggcgataccctggtgaatcgcatcgagctgaccggcaccgatttcaaggaggatggcaacatcctgggcaataagatggagtacaactacaacgcccacaatgtgtacatcatgaccgacaaggccaagaatggcatcaaggtgaacttcaagatccgccacaacatcgaggatggcagcgtgcagctggccgaccactaccagcagaatacccccatcggcgatggccctgtgctgctgcccgataaccactacctgtccacccagagcgccctgtccaaggaccccaacgagaagcgcgatcacatgatctacttcggcttcgtgaccgccgccgccatcacccacggcatggatgagctgtacaag

SEQ ID NO: 210659 - protein, 238 aa, Artificial Sequence
  Description of Artificial Sequence: Synthetic polypeptide
VSKGAELFTGIVPILIELNGDVNGHKFSVSGEGEGDATYGKLTLKFICTTGKLPVPWPTLVTTLSYGVQCFSRYPDHMKQHDFFKSAMPEGYIQERTIFFEDDGNYKSRAEVKFEGDTLVNRIELTGTDFKEDGNILGNKMEYNYNAHNVYIMTDKAKNGIKVNFKIRHNIEDGSVQLADHYQQNTPIGDGPVLLPDNHYLSTQSALSKDPNEKRDHMIYFGFVTAAAITHGMDELYK

SEQ ID NO: 210660 - DNA, 714 bp, Artificial Sequence
  Description of Artificial Sequence: Synthetic polynucleotide
gtgagcaagggcgccgagctgttcaccggcatcgtgcccatcctgatcgagctgaatggcgatgtgaatggccacaagttcagcgtgagcggcgagggcgagggcgatgccacctacggcaagctgaccctgaagttcatctgcaccaccggcaagctgcctgtgccctggcccaccctggtgaccaccctgagctacggcgtgcagtgcttctcacgctaccccgatcacatgaagcagcacgacttcttcaagagcgccatgcctgagggctacatccaggagcgcaccatcttcttcgaggatgacggcaactacaagtcgcgcgccgaggtgaagttcgagggcgataccctggtgaatcgcatcgagctgaccggcaccgatttcaaggaggatggcaacatcctgggcaataagatggagtacaactacaacgcccacaatgtgtacatcatgaccgacaaggccaagaatggcatcaaggtgaacttcaagatccgccacaacatcgaggatggcagcgtgcagctggccgaccactaccagcagaatacccccatcggcgatggccctgtgctgctgcccgataaccactacctgtccacccagagcgccctgtccaaggaccccaacgagaagcgcgatcacatgatctacttcggcttcgtgaccgccgccgccatcacccacggcatggatgagctgtacaag

SEQ ID NO: 210661 - protein, 557 aa, Macaca mulatta
MPPPCLLFFLLFLTPMEVRPQEPLVVKVEEGDNAVLQCLEGTSDGPTQQLVWCRDSPFEPFLNLSLGLPGMGIRMGPLGIWLLIFNVSNQTGGFYLCQPGLPSEKAWQPGWTVSVEGSGELFRWNVSDLGGLGCGLKNRSSEGPSSPSGKLNSSQLYVWAKDRPEMWEGEPVCGPPRDSLNQSLSQDLTMAPGSTLWLSCGVPPDSVSRGPLSWTHVRPKGPKSSLLSLELKDDRPDRDMWVVDTGLLLTRATAQDAGKYYCHRGNWTKSFYLEITARPALWHWLLRIGGWKVPAVTLTYLIFCLCSLVGILQLQRALVLRRKRKRMTDPTRRFFKVTPPPGSGPQNQYGNVLSLPTPTSGLGRAQRWAAGLGGTAPSYGNPSSDVQVDGAVGSRSPPGAGPEEEEGEGYEEPDSEEGSEFYENDSNFGQDQLSQDGSGYENPEDEPLGPEDEDSFSNAESYENEDEELTQPVARTMDFLSPHGSAWDPSREATSLGSQSYEDMRGLLYAAPQLRTIRGQPGPNHEEDADSYENMDNPDGPDPAWGGGGRMGTWSAR

SEQ ID NO: 210662 - protein, 557 aa, Artificial Sequence
  Description of Artificial Sequence: Synthetic CD19 mutant sequence
MPPPRLLFFLLFLTPMEVRPEEPLVVKVEEGDNAVLQCLKGTSDGPTQQLTWSRESPLKPFLKLSLGLPGLGIHMRPLAIWLFIFNVSQQMGGFYLCQPGPPSEKAWQPGWTVNVEGSGELFRWNVSDLGGLGCGLKNRSSEGPSSPSGKLMSPKLYVWAKDRPEIWEGEPPCLPPRDSLNQSLSQDLTMAPGSTLWLSCGVPPDSVSRGPLSWTHVRPKGPKSLLSLELKDDRPDRDMWVVDTGLLLTRATAQDAGKYYCHRGNLTMSFHLEITARPVLWHWLLRTGGWKVSAVTLAYLIFCLCSLVGILHLQRALVLRRKRKRMTDPTRRFFKVTPPPGSGPQNQYGNVLSLPTPTSGLGRAQRWAAGLGGTAPSYGNPSSDVQADGALGSRSPPGVGPEEEEGEGYEEPDSEEDSEFYENDSNLGQDQLSQDGSGYENPEDEPLGPEDEDSFSNAESYENEDEELTQPVARTMDFLSPHGSAWDPSREATSLAGSQSYEDMRGILYAAPQLRSIRGQPGPNHEEDADSYENMDNPDGPDPAWGGGGRMGTWSTR

SEQ ID NO: 210663 - protein, 557 aa, Artificial Sequence
  Description of Artificial Sequence: Synthetic CD19 mutant sequence
MPPPRLLFFLLFLTPMEVRPEEPLVVKVEEGDNAVLQCLKGTSDGPTQQLTWSRESPLKPFLKLSLGLPGLGIHMRPLAIWLFIFNVSQQMGGFYLCQPGPPSEKAWQPGWTVNVEGSGELFRWNVSDLGGLGCGLKNRSSEGPSSPSGKLMSPKLYVWAKDRPEIWEGEPPCLPPRDSLNQSLSQDLTMAPGSTLWLSCGVPPDSVSRGPLSWTHVRPKGPKSLLSLELKDDRPDRDMWVMETGLLLPRATAQDAGKYYCHRGNLTMSFHLEITARPVLWHWLLRTGGWKVSAVTLAYLIFCLCSLVGILHLQRALVLRRKRKRMTDPTRRFFKVTPPPGSGPQNQYGNVLSLPTPTSGLGRAQRWAAGLGGTAPSYGNPSSDVQADGALGSRSPPGVGPEEEEGEGYEEPDSEEDSEFYENDSNLGQDQLSQDGSGYENPEDEPLGPEDEDSFSNAESYENEDEELTQPVARTMDFLSPHGSAWDPSREATSLAGSQSYEDMRGILYAAPQLRSIRGQPGPNHEEDADSYENMDNPDGPDPAWGGGGRMGTWSTR

SEQ ID NO: 210664 - protein, 467 aa, Artificial Sequence
  Description of Artificial Sequence: Synthetic CD19 mutant sequence
MPPPRLLFFLLFLTPMEVRPEEPLVVKVEGELFRWNVSDLGGLGCGLKNRSSEGPSSPSGKLMSPKLYVWAKDRPEIWEGEPPCLPPRDSLNQSLSQDLTMAPGSTLWLSCGVPPDSVSRGPLSWTHVHPKGPKSLLSLELKDDRPARDMWVMETGLLLPRATAQDAGKYYCHRGNLTMSFHLEITARPVLWHWLLRTGGWKVSAVTLAYLIFCLCSLVGILHLQRALVLRRKRKRMTDPTRRFFKVTPPPGSGPQNQYGNVLSLPTPTSGLGRAQRWAAGLGGTAPSYGNPSSDVQADGALGSRSPPGVGPEEEEGEGYEEPDSEEDSEFYENDSNLGQDQLSQDGSGYENPEDEPLGPEDEDSFSNAESYENEDEELTQPVARTMDFLSPHGSAWDPSREATSLGSQSYEDMRGILYAAPQLRSIRGQPGPNHEEDADSYENMDNPDGPDPAWGGGGRMGTWSTR

SEQ ID NO: 210665 - protein, 278 aa, Artificial Sequence
  Description of Artificial Sequence: Synthetic CD19 mutant sequence
MPPPRLLFFLLFLTPMEVRPEEPLVVKVEEGDNAVLQCLKGTSDGPTQQLTWSRESPLKPFLKLSLGLPGLGIHMRPLAIWLFIFNVSQQMGGFYLCQPGPPSEKAWQPGWTVNVEGSGELFRWNVSDLGGLGCGLKNRSSEGPSSPSGKLMSPKLYVWAKDRPEIWEGEPPCLPPRDSLNQSLSQDLTMAPGSTLWLSCGVPPDSVSRGPLSWTHVHPKGPKSLLSLELKDDRPARDMWVMETGLLLPRATAQDAGKYYCHRGNLTMSFHLEITARP

SEQ ID NO: 210666 - protein, 189 aa, Artificial Sequence
  Description of Artificial Sequence: Synthetic CD19 mutant sequence
MPPPRLLFFLLFLTPMEVRPEEPLVVKVEGELFRWNVSDLGGLGCGLKNRSSEGPSSPSGKLMSPKLYVWAKDRPEIWEGEPPCLPPRDSLNQSLSQDLTMAPGSTLWLSCGVPPDSVSRGPLSWTHVHPKGPKSLLSLELKDDRPARDMWVMETGLLLPRATAQDAGKYYCHRGNLTMSFHLEITARP

SEQ ID NO: 210667 - protein, 4 aa, Artificial Sequence
  Description of Artificial Sequence: Synthetic Linker
SLDG

SEQ ID NO: 210668 - DNA, 12 bp, Artificial Sequence
  Description of Artificial Sequence: Synthetic Linker
agtctagatgga

SEQ ID NO: 210669 - DNA, 12 bp, Artificial Sequence
  Description of Artificial Sequence: Synthetic Linker
agcctagatgga

SEQ ID NO: 210670 - protein, 501 aa, Artificial Sequence
  Description of Artificial Sequence: Synthetic Construct
MVSKGAELFTGIVPILIELNGDVNGHKFSVSGEGEGDATYGKLTLKFICTTGKLPVPWPTLVTTLSYGVQCFSRYPDHMKQHDFFKSAMPEGYIQERTIFFEDDGNYKSRAEVKFEGDTLVNRIELTGTDFKEDGNILGNKMEYNYNAHNVYIMTDKAKNGIKVNFKIRHNIEDGSVQLADHYQQNTPIGDGPVLLPDNHYLSTQSALSKDPNEKRDHMIYFGFVTAAAITHGMDELYKGSGSHHWGYGKHNGPEHWHKDFPIAKGERQSPVDIDTHTAKYDPSLKPLSVSYDQATSLRILNNGHAFNVEFDDSQDKAVLKGGPLDGTYRLIQFHFHWGSLDGQGSEHTVDKKKYAAELHLVHWNTKYGDFGKAVQQPDGLAVLGIFLKVGSAKPGLQKVVDVLDSIKTKGKSADFTNFDPRGLLPESLDYWTYPGSLTTPPLLECVTWIVLKEPISVSSEQVLKFRKLNFNGEGEPEELMVDNWRPAQPLKNRQIKASFK

SEQ ID NO: 210671 - DNA, 1506 bp, Artificial Sequence
  Description of Artificial Sequence: Synthetic Construct
atggtgagcaagggcgccgagctgttcaccggcatcgtgcccatcctgatcgagctgaatggcgatgtgaatggccacaagttcagcgtgagcggcgagggcgagggcgatgccacctacggcaagctgaccctgaagttcatctgcaccaccggcaagctgcctgtgccctggcccaccctggtgaccaccctgagctacggcgtgcagtgcttctcacgctaccccgatcacatgaagcagcacgacttcttcaagagcgccatgcctgagggctacatccaggagcgcaccatcttcttcgaggatgacggcaactacaagtcgcgcgccgaggtgaagttcgagggcgataccctggtgaatcgcatcgagctgaccggcaccgatttcaaggaggatggcaacatcctgggcaataagatggagtacaactacaacgcccacaatgtgtacatcatgaccgacaaggccaagaatggcatcaaggtgaacttcaagatccgccacaacatcgaggatggcagcgtgcagctggccgaccactaccagcagaatacccccatcggcgatggccctgtgctgctgcccgataaccactacctgtccacccagagcgccctgtccaaggaccccaacgagaagcgcgatcacatgatctacttcggcttcgtgaccgccgccgccatcacccacggcatggatgagctgtacaagggatccggttcccatcactgggggtacggcaaacacaacggacctgagcactggcataaggacttccccattgccaagggagagcgccagtcccctgttgacatcgacactcatacagccaagtatgacccttccctgaagcccctgtctgtttcctatgatcaagcaacttccctgaggatcctcaacaatggtcatgctttcaacgtggagtttgatgactctcaggacaaagcagtgctcaagggaggacccctggatggcacttacagattgattcagtttcactttcactggggttcacttgatggacaaggttcagagcatactgtggataaaaagaaatatgctgcagaacttcacttggttcactggaacaccaaatatggggattttgggaaagctgtgcagcaacctgatggactggccgttctaggtatttttttgaaggttggcagcgctaaaccgggccttcagaaagttgttgatgtgctggattccattaaaacaaagggcaagagtgctgacttcactaacttcgatcctcgtggcctccttcctgaatccctggattactggacctacccaggctcactgaccacccctcctcttctggaatgtgtgacctggattgtgctcaaggaacccatcagcgtcagcagcgagcaggtgttgaaattccgtaaacttaacttcaatggggagggtgaacccgaagaactgatggtggacaactggcgcccagctcagccactgaagaacaggcaaatcaaagcttccttcaaatga

SEQ ID NO: 210672 - protein, 758 aa, Artificial Sequence
  Description of Artificial Sequence: Synthetic Construct
MVSKGAELFTGIVPILIELNGDVNGHKFSVSGEGEGDATYGKLTLKFICTTGKLPVPWPTLVTTLSYGVQCFSRYPDHMKQHDFFKSAMPEGYIQERTIFFEDDGNYKSRAEVKFEGDTLVNRIELTGTDFKEDGNILGNKMEYNYNAHNVYIMTDKAKNGIKVNFKIRHNIEDGSVQLADHYQQNTPIGDGPVLLPDNHYLSTQSALSKDPNEKRDHMIYFGFVTAAAITHGMDELYKGSSHHWGYGKHNGPEHWHKDFPIAKGERQSPVDIDTHTAKYDPSLKPLSVSYDQATSLRILNNGHAFNVEFDDSQDKAVLKGGPLDGTYRLIQFHFHWGSLDGQGSEHTVDKKKYAAELHLVHWNTKYGDFGKAVQQPDGLAVLGIFLKVGSAKPGLQKVVDVLDSIKTKGKSADFTNFDPRGLLPESLDYWTYPGSLTTPPLLECVTWIVLKEPISVSSEQVLKFRKLNFNGEGEPEELMVDNWRPAQPLKNRQIKASFKSLDGATNFSLLKQAGDVEENPGPLSKGEEDNMAIIKEFMRFKVHMEGSVNGHEFEIEGEGEGRPYEGTQTAKLKVTKGGPLPFAWDILSPQFMYGSKAYVKHPADIPDYLKLSFPEGFKWERVMNFEDGGVVTVTQDSSLQDGEFIYKVKLRGTNFPSDGPVMQKKTMGWEASSERMYPEDGALKGEIKQRLKLKDGGHYDAEVKTTYKAKKPVQLPGAYNVNIKLDITSHNEDYTIVEQYERAEGRHSTGGMDELYK

SEQ ID NO: 210673 - DNA, 2277 bp, Artificial Sequence
  Description of Artificial Sequence: Synthetic Construct
atggtgagcaagggcgccgagctgttcaccggcatcgtgcccatcctgatcgagctgaatggcgatgtgaatggccacaagttcagcgtgagcggcgagggcgagggcgatgccacctacggcaagctgaccctgaagttcatctgcaccaccggcaagctgcctgtgccctggcccaccctggtgaccaccctgagctacggcgtgcagtgcttctcacgctaccccgatcacatgaagcagcacgacttcttcaagagcgccatgcctgagggctacatccaggagcgcaccatcttcttcgaggatgacggcaactacaagtcgcgcgccgaggtgaagttcgagggcgataccctggtgaatcgcatcgagctgaccggcaccgatttcaaggaggatggcaacatcctgggcaataagatggagtacaactacaacgcccacaatgtgtacatcatgaccgacaaggccaagaatggcatcaaggtgaacttcaagatccgccacaacatcgaggatggcagcgtgcagctggccgaccactaccagcagaatacccccatcggcgatggccctgtgctgctgcccgataaccactacctgtccacccagagcgccctgtccaaggaccccaacgagaagcgcgatcacatgatctacttcggcttcgtgaccgccgccgccatcacccacggcatggatgagctgtacaagggatcctcccatcactgggggtacggcaaacacaacggacctgagcactggcataaggacttccccattgccaagggagagcgccagtcccctgttgacatcgacactcatacagccaagtatgacccttccctgaagcccctgtctgtttcctatgatcaagcaacttccctgaggatcctcaacaatggtcatgctttcaacgtggagtttgatgactctcaggacaaagcagtgctcaagggaggacccctggatggcacttacagattgattcagtttcactttcactggggttcacttgatggacaaggttcagagcatactgtggataaaaagaaatatgctgcagaacttcacttggttcactggaacaccaaatatggggattttgggaaagctgtgcagcaacctgatggactggccgttctaggtatttttttgaaggttggcagcgctaaaccgggccttcagaaagttgttgatgtgctggattccattaaaacaaagggcaagagtgctgacttcactaacttcgatcctcgtggcctccttcctgaatccctggattactggacctacccaggctcactgaccacccctcctcttctggaatgtgtgacctggattgtgctcaaggaacccatcagcgtcagcagcgagcaggtgttgaaattccgtaaacttaacttcaatggggagggtgaacccgaagaactgatggtggacaactggcgcccagctcagccactgaagaacaggcaaatcaaagcttccttcaaaagtctagatggagctactaacttcagcctgctgaagcaggctggagacgtggaggagaaccctggacctttgagcaagggcgaggaggacaacatggccatcatcaaggagttcatgcgcttcaaggtgcacatggagggctccgtgaacggccacgagttcgagatcgagggcgagggcgagggccgcccctacgagggcacccagaccgccaagctgaaggtgaccaagggcggccccctgcccttcgcctgggacatcctgtcccctcagttcatgtacggctccaaggcctacgtgaagcaccccgccgacatccccgactacttgaagctgtccttccccgagggcttcaagtgggagcgcgtgatgaacttcgaggacggcggcgtggtgaccgtgacccaggactcctccctgcaggacggcgagttcatctacaaggtgaagctgcgcggcaccaacttcccctccgacggccccgtaatgcagaagaagaccatgggctgggaggcctcctccgagcggatgtaccccgaggacggcgccctgaagggcgagatcaagcagaggctgaagctgaaggacggcggccactacgacgccgaggtcaagaccacctacaaggccaagaagcccgtgcagctgcccggcgcctacaacgtcaacatcaagctggacatcacctcccacaacgaggactacaccatcgtggaacagtacgagcgcgccgagggccgccactccaccggcggcatggacgagctgtacaagtaa

SEQ ID NO: 210674 - protein, 758 aa, Artificial Sequence
  Description of Artificial Sequence: Synthetic Construct
MVSKGAELFTGIVPILIELNGDVNGHKFSVSGEGEGDATYGKLTLKFICTTGKLPVPWPTLVTTLSYGVQCFSRYPDHMKQHDFFKSAMPEGYIQERTIFFEDDGNYKSRAEVKFEGDTLVNRIELTGTDFKEDGNILGNKMEYNYNAHNVYIMTDKAKNGIKVNFKIRHNIEDGSVQLADHYQQNTPIGDGPVLLPDNHYLSTQSALSKDPNEKRDHMIYFGFVTAAAITHGMDELYKGSSHHWGYGKHNGPEHWHKDFPIAKGERQSPVDIDTHTAKYDPSLKPLSVSYDQATSLRILNNGHAFNVEFDDSQDKAVLKGGPLDGTYRLIQFHFHWGSLDGQGSEHTVDKKKYAAELHLVHWNTKYGDFGKAVQQPDGLAVLGIFLKVGSAKPGLQKVVDVLDSIKTKGKSADFTNFDPRGLLPESLDYWTYPGSLTTPPLLECVTSIVLKEPISVSSEQVLKFRKLNFNGEGEPEELMVDNWRPAQPLKNRQIKASFKSLDGATNFSLLKQAGDVEENPGPLSKGEEDNMAIIKEFMRFKVHMEGSVNGHEFEIEGEGEGRPYEGTQTAKLKVTKGGPLPFAWDILSPQFMYGSKAYVKHPADIPDYLKLSFPEGFKWERVMNFEDGGVVTVTQDSSLQDGEFIYKVKLRGTNFPSDGPVMQKKTMGWEASSERMYPEDGALKGEIKQRLKLKDGGHYDAEVKTTYKAKKPVQLPGAYNVNIKLDITSHNEDYTIVEQYERAEGRHSTGGMDELYK

SEQ ID NO: 210675 - DNA, 2277 bp, Artificial Sequence
  Description of Artificial Sequence: Synthetic Construct
atggtgagcaagggcgccgagctgttcaccggcatcgtgcccatcctgatcgagctgaatggcgatgtgaatggccacaagttcagcgtgagcggcgagggcgagggcgatgccacctacggcaagctgaccctgaagttcatctgcaccaccggcaagctgcctgtgccctggcccaccctggtgaccaccctgagctacggcgtgcagtgcttctcacgctaccccgatcacatgaagcagcacgacttcttcaagagcgccatgcctgagggctacatccaggagcgcaccatcttcttcgaggatgacggcaactacaagtcgcgcgccgaggtgaagttcgagggcgataccctggtgaatcgcatcgagctgaccggcaccgatttcaaggaggatggcaacatcctgggcaataagatggagtacaactacaacgcccacaatgtgtacatcatgaccgacaaggccaagaatggcatcaaggtgaacttcaagatccgccacaacatcgaggatggcagcgtgcagctggccgaccactaccagcagaatacccccatcggcgatggccctgtgctgctgcccgataaccactacctgtccacccagagcgccctgtccaaggaccccaacgagaagcgcgatcacatgatctacttcggcttcgtgaccgccgccgccatcacccacggcatggatgagctgtacaagggatcctcccatcactgggggtacggcaaacacaacggacctgagcactggcataaggacttccccattgccaagggagagcgccagtcccctgttgacatcgacactcatacagccaagtatgacccttccctgaagcccctgtctgtttcctatgatcaagcaacttccctgaggatcctcaacaatggtcatgctttcaacgtggagtttgatgactctcaggacaaagcagtgctcaagggaggacccctggatggcacttacagattgattcagtttcactttcactggggttcacttgatggacaaggttcagagcatactgtggataaaaagaaatatgctgcagaacttcacttggttcactggaacaccaaatatggggattttgggaaagctgtgcagcaacctgatggactggccgttctaggtatttttttgaaggttggcagcgctaaaccgggccttcagaaagttgttgatgtgctggattccattaaaacaaagggcaagagtgctgacttcactaacttcgatcctcgtggcctccttcctgaatccctggattactggacctacccaggctcactgaccacccctcctcttctggaatgtgtgaccagcattgtgctcaaggaacccatcagcgtcagcagcgagcaggtgttgaaattccgtaaacttaacttcaatggggagggtgaacccgaagaactgatggtggacaactggcgcccagctcagccactgaagaacaggcaaatcaaagcttccttcaaaagtctagatggagctactaacttcagcctgctgaagcaggctggagacgtggaggagaaccctggacctttgagcaagggcgaggaggacaacatggccatcatcaaggagttcatgcgcttcaaggtgcacatggagggctccgtgaacggccacgagttcgagatcgagggcgagggcgagggccgcccctacgagggcacccagaccgccaagctgaaggtgaccaagggcggccccctgcccttcgcctgggacatcctgtcccctcagttcatgtacggctccaaggcctacgtgaagcaccccgccgacatccccgactacttgaagctgtccttccccgagggcttcaagtgggagcgcgtgatgaacttcgaggacggcggcgtggtgaccgtgacccaggactcctccctgcaggacggcgagttcatctacaaggtgaagctgcgcggcaccaacttcccctccgacggccccgtaatgcagaagaagaccatgggctgggaggcctcctccgagcggatgtaccccgaggacggcgccctgaagggcgagatcaagcagaggctgaagctgaaggacggcggccactacgacgccgaggtcaagaccacctacaaggccaagaagcccgtgcagctgcccggcgcctacaacgtcaacatcaagctggacatcacctcccacaacgaggactacaccatcgtggaacagtacgagcgcgccgagggccgccactccaccggcggcatggacgagctgtacaagtaa

SEQ ID NO: 210676 - protein, 758 aa, Artificial Sequence
  Description of Artificial Sequence: Synthetic Construct
MVSKGAELFTGIVPILIELNGDVNGHKFSVSGEGEGDATYGKLTLKFICTTGKLPVPWPTLVTTLSYGVQCFSRYPDHMKQHDFFKSAMPEGYIQERTIFFEDDGNYKSRAEVKFEGDTLVNRIELTGTDFKEDGNILGNKMEYNYNAHNVYIMTDKAKNGIKVNFKIRHNIEDGSVQLADHYQQNTPIGDGPVLLPDNHYLSTQSALSKDPNEKRDHMIYFGFVTAAAITHGMDELYKGSSHHWGYGKHNGPEHWHKDFPIAKGERQSPVDIDTHTAKYDPSLKPLSVSNDQATSLRILNNGHAFNVEFDDSQDKAVLKGGPLDGTYRLIQFHFHWGSLDGQGSEHTVDKKKYAAELHLVHWNTKYGDFGKAVQQPDGLAVLGIFLKVGSAKPGLQKVVDVLDSIKTKGKSADFTNFDPRGLLPESLDYWTYPGSLTTPPLLECVTWIVLKEPISVSSEQVLKFRKLNFNGEGEPEELMVDNWRPAQPLKNRQIKASFKSLDGATNFSLLKQAGDVEENPGPLSKGEEDNMAIIKEFMRFKVHMEGSVNGHEFEIEGEGEGRPYEGTQTAKLKVTKGGPLPFAWDILSPQFMYGSKAYVKHPADIPDYLKLSFPEGFKWERVMNFEDGGVVTVTQDSSLQDGEFIYKVKLRGTNFPSDGPVMQKKTMGWEASSERMYPEDGALKGEIKQRLKLKDGGHYDAEVKTTYKAKKPVQLPGAYNVNIKLDITSHNEDYTIVEQYERAEGRHSTGGMDELYK

SEQ ID NO: 210677 - DNA, 2277 bp, Artificial Sequence
  Description of Artificial Sequence: Synthetic Construct
atggtgagcaagggcgccgagctgttcaccggcatcgtgcccatcctgatcgagctgaatggcgatgtgaatggccacaagttcagcgtgagcggcgagggcgagggcgatgccacctacggcaagctgaccctgaagttcatctgcaccaccggcaagctgcctgtgccctggcccaccctggtgaccaccctgagctacggcgtgcagtgcttctcacgctaccccgatcacatgaagcagcacgacttcttcaagagcgccatgcctgagggctacatccaggagcgcaccatcttcttcgaggatgacggcaactacaagtcgcgcgccgaggtgaagttcgagggcgataccctggtgaatcgcatcgagctgaccggcaccgatttcaaggaggatggcaacatcctgggcaataagatggagtacaactacaacgcccacaatgtgtacatcatgaccgacaaggccaagaatggcatcaaggtgaacttcaagatccgccacaacatcgaggatggcagcgtgcagctggccgaccactaccagcagaatacccccatcggcgatggccctgtgctgctgcccgataaccactacctgtccacccagagcgccctgtccaaggaccccaacgagaagcgcgatcacatgatctacttcggcttcgtgaccgccgccgccatcacccacggcatggatgagctgtacaagggatcctcccatcactgggggtacggcaaacacaacggacctgagcactggcataaggacttccccattgccaagggagagcgccagtcccctgttgacatcgacactcatacagccaagtatgacccttccctgaagcccctgtctgtttccaatgatcaagcaacttccctgaggatcctcaacaatggtcatgctttcaacgtggagtttgatgactctcaggacaaagcagtgctcaagggaggacccctggatggcacttacagattgattcagtttcactttcactggggttcacttgatggacaaggttcagagcatactgtggataaaaagaaatatgctgcagaacttcacttggttcactggaacaccaaatatggggattttgggaaagctgtgcagcaacctgatggactggccgttctaggtatttttttgaaggttggcagcgctaaaccgggccttcagaaagttgttgatgtgctggattccattaaaacaaagggcaagagtgctgacttcactaacttcgatcctcgtggcctccttcctgaatccctggattactggacctacccaggctcactgaccacccctcctcttctggaatgtgtgacctggattgtgctcaaggaacccatcagcgtcagcagcgagcaggtgttgaaattccgtaaacttaacttcaatggggagggtgaacccgaagaactgatggtggacaactggcgcccagctcagccactgaagaacaggcaaatcaaagcttccttcaaaagtctagatggagctactaacttcagcctgctgaagcaggctggagacgtggaggagaaccctggacctttgagcaagggcgaggaggacaacatggccatcatcaaggagttcatgcgcttcaaggtgcacatggagggctccgtgaacggccacgagttcgagatcgagggcgagggcgagggccgcccctacgagggcacccagaccgccaagctgaaggtgaccaagggcggccccctgcccttcgcctgggacatcctgtcccctcagttcatgtacggctccaaggcctacgtgaagcaccccgccgacatccccgactacttgaagctgtccttccccgagggcttcaagtgggagcgcgtgatgaacttcgaggacggcggcgtggtgaccgtgacccaggactcctccctgcaggacggcgagttcatctacaaggtgaagctgcgcggcaccaacttcccctccgacggccccgtaatgcagaagaagaccatgggctgggaggcctcctccgagcggatgtaccccgaggacggcgccctgaagggcgagatcaagcagaggctgaagctgaaggacggcggccactacgacgccgaggtcaagaccacctacaaggccaagaagcccgtgcagctgcccggcgcctacaacgtcaacatcaagctggacatcacctcccacaacgaggactacaccatcgtggaacagtacgagcgcgccgagggccgccactccaccggcggcatggacgagctgtacaagtaa

SEQ ID NO: 210678 - protein, 758 aa, Artificial Sequence
  Description of Artificial Sequence: Synthetic Construct
MVSKGAELFTGIVPILIELNGDVNGHKFSVSGEGEGDATYGKLTLKFICTTGKLPVPWPTLVTTLSYGVQCFSRYPDHMKQHDFFKSAMPEGYIQERTIFFEDDGNYKSRAEVKFEGDTLVNRIELTGTDFKEDGNILGNKMEYNYNAHNVYIMTDKAKNGIKVNFKIRHNIEDGSVQLADHYQQNTPIGDGPVLLPDNHYLSTQSALSKDPNEKRDHMIYFGFVTAAAITHGMDELYKGSSHHWGYGKHNGPEHWHKDFPIAKGERQSPVDIDTHTAKYDPSLKPLSVSYDQATNLRILNNGHAFNVEFDDSQDKAVLKGGPLDGTYRLIQFHFHWGSLDGQGSEHTVDKKKYAAELHLVHWNTKYGDFGKAVQQPDGLAVLGIFLKVGSAKPGLQKVVDVLDSIKTKGKSADFTNFDPRGLLPESLDYWTYPGSLTTPPLLECVTWIVLKEPISVSSEQVLKFRKLNFNGEGEPEELMVDNWRPAQPLKNRQIKASFKSLDGATNFSLLKQAGDVEENPGPLSKGEEDNMAIIKEFMRFKVHMEGSVNGHEFEIEGEGEGRPYEGTQTAKLKVTKGGPLPFAWDILSPQFMYGSKAYVKHPADIPDYLKLSFPEGFKWERVMNFEDGGVVTVTQDSSLQDGEFIYKVKLRGTNFPSDGPVMQKKTMGWEASSERMYPEDGALKGEIKQRLKLKDGGHYDAEVKTTYKAKKPVQLPGAYNVNIKLDITSHNEDYTIVEQYERAEGRHSTGGMDELYK

SEQ ID NO: 210679 - DNA, 2277 bp, Artificial Sequence
  Description of Artificial Sequence: Synthetic Construct
atggtgagcaagggcgccgagctgttcaccggcatcgtgcccatcctgatcgagctgaatggcgatgtgaatggccacaagttcagcgtgagcggcgagggcgagggcgatgccacctacggcaagctgaccctgaagttcatctgcaccaccggcaagctgcctgtgccctggcccaccctggtgaccaccctgagctacggcgtgcagtgcttctcacgctaccccgatcacatgaagcagcacgacttcttcaagagcgccatgcctgagggctacatccaggagcgcaccatcttcttcgaggatgacggcaactacaagtcgcgcgccgaggtgaagttcgagggcgataccctggtgaatcgcatcgagctgaccggcaccgatttcaaggaggatggcaacatcctgggcaataagatggagtacaactacaacgcccacaatgtgtacatcatgaccgacaaggccaagaatggcatcaaggtgaacttcaagatccgccacaacatcgaggatggcagcgtgcagctggccgaccactaccagcagaatacccccatcggcgatggccctgtgctgctgcccgataaccactacctgtccacccagagcgccctgtccaaggaccccaacgagaagcgcgatcacatgatctacttcggcttcgtgaccgccgccgccatcacccacggcatggatgagctgtacaagggatcctcccatcactgggggtacggcaaacacaacggacctgagcactggcataaggacttccccattgccaagggagagcgccagtcccctgttgacatcgacactcatacagccaagtatgacccttccctgaagcccctgtctgtttcctatgatcaagcaactaatctgaggatcctcaacaatggtcatgctttcaacgtggagtttgatgactctcaggacaaagcagtgctcaagggaggacccctggatggcacttacagattgattcagtttcactttcactggggttcacttgatggacaaggttcagagcatactgtggataaaaagaaatatgctgcagaacttcacttggttcactggaacaccaaatatggggattttgggaaagctgtgcagcaacctgatggactggccgttctaggtatttttttgaaggttggcagcgctaaaccgggccttcagaaagttgttgatgtgctggattccattaaaacaaagggcaagagtgctgacttcactaacttcgatcctcgtggcctccttcctgaatccctggattactggacctacccaggctcactgaccacccctcctcttctggaatgtgtgacctggattgtgctcaaggaacccatcagcgtcagcagcgagcaggtgttgaaattccgtaaacttaacttcaatggggagggtgaacccgaagaactgatggtggacaactggcgcccagctcagccactgaagaacaggcaaatcaaagcttccttcaaaagtctagatggagctactaacttcagcctgctgaagcaggctggagacgtggaggagaaccctggacctttgagcaagggcgaggaggacaacatggccatcatcaaggagttcatgcgcttcaaggtgcacatggagggctccgtgaacggccacgagttcgagatcgagggcgagggcgagggccgcccctacgagggcacccagaccgccaagctgaaggtgaccaagggcggccccctgcccttcgcctgggacatcctgtcccctcagttcatgtacggctccaaggcctacgtgaagcaccccgccgacatccccgactacttgaagctgtccttccccgagggcttcaagtgggagcgcgtgatgaacttcgaggacggcggcgtggtgaccgtgacccaggactcctccctgcaggacggcgagttcatctacaaggtgaagctgcgcggcaccaacttcccctccgacggccccgtaatgcagaagaagaccatgggctgggaggcctcctccgagcggatgtaccccgaggacggcgccctgaagggcgagatcaagcagaggctgaagctgaaggacggcggccactacgacgccgaggtcaagaccacctacaaggccaagaagcccgtgcagctgcccggcgcctacaacgtcaacatcaagctggacatcacctcccacaacgaggactacaccatcgtggaacagtacgagcgcgccgagggccgccactccaccggcggcatggacgagctgtacaagtaa

SEQ ID NO: 210680 - protein, 758 aa, Artificial Sequence
  Description of Artificial Sequence: Synthetic Construct
MVSKGAELFTGIVPILIELNGDVNGHKFSVSGEGEGDATYGKLTLKFICTTGKLPVPWPTLVTTLSYGVQCFSRYPDHMKQHDFFKSAMPEGYIQERTIFFEDDGNYKSRAEVKFEGDTLVNRIELTGTDFKEDGNILGNKMEYNYNAHNVYIMTDKAKNGIKVNFKIRHNIEDGSVQLADHYQQNTPIGDGPVLLPDNHYLSTQSALSKDPNEKRDHMIYFGFVTAAAITHGMDELYKGSSHHWGYGKHNGPEHWHKDFPIAKGERQSPVDIDTHTAKYDPSLKPLSVSYDQATSLRILNNGHAFNVEFDFSQDKAVLKGGPLDGTYRLIQFHFHWGSLDGQGSEHTVDKKKYAAELHLVHWNTKYGDFGKAVQQPDGLAVLGIFLKVGSAKPGLQKVVDVLDSIKTKGKSADFTNFDPRGLLPESLDYWTYPGSLTTPPLLECVTWIVLKEPISVSSEQVLKFRKLNFNGEGEPEELMFDNWRPAQLLKNRQIKASFKSLDGATNFSLLKQAGDVEENPGPLSKGEEDNMAIIKEFMRFKVHMEGSVNGHEFEIEGEGEGRPYEGTQTAKLKVTKGGPLPFAWDILSPQFMYGSKAYVKHPADIPDYLKLSFPEGFKWERVMNFEDGGVVTVTQDSSLQDGEFIYKVKLRGTNFPSDGPVMQKKTMGWEASSERMYPEDGALKGEIKQRLKLKDGGHYDAEVKTTYKAKKPVQLPGAYNVNIKLDITSHNEDYTIVEQYERAEGRHSTGGMDELYK

SEQ ID NO: 210681 - DNA, 2277 bp, Artificial Sequence
  Description of Artificial Sequence: Synthetic Construct
atggtgagcaagggcgccgagctgttcaccggcatcgtgcccatcctgatcgagctgaatggcgatgtgaatggccacaagttcagcgtgagcggcgagggcgagggcgatgccacctacggcaagctgaccctgaagttcatctgcaccaccggcaagctgcctgtgccctggcccaccctggtgaccaccctgagctacggcgtgcagtgcttctcacgctaccccgatcacatgaagcagcacgacttcttcaagagcgccatgcctgagggctacatccaggagcgcaccatcttcttcgaggatgacggcaactacaagtcgcgcgccgaggtgaagttcgagggcgataccctggtgaatcgcatcgagctgaccggcaccgatttcaaggaggatggcaacatcctgggcaataagatggagtacaactacaacgcccacaatgtgtacatcatgaccgacaaggccaagaatggcatcaaggtgaacttcaagatccgccacaacatcgaggatggcagcgtgcagctggccgaccactaccagcagaatacccccatcggcgatggccctgtgctgctgcccgataaccactacctgtccacccagagcgccctgtccaaggaccccaacgagaagcgcgatcacatgatctacttcggcttcgtgaccgccgccgccatcacccacggcatggatgagctgtacaagggatcctcccatcactgggggtacggcaaacacaacggacctgagcactggcataaggacttccccattgccaagggagagcgccagtcccctgttgacatcgacactcatacagccaagtatgacccttccctgaagcccctgtctgtttcctatgatcaagcaacttccctgaggatcctcaacaatggtcatgctttcaacgtggagtttgatttttctcaggacaaagcagtgctcaagggaggacccctggatggcacttacagattgattcagtttcactttcactggggttcacttgatggacaaggttcagagcatactgtggataaaaagaaatatgctgcagaacttcacttggttcactggaacaccaaatatggggattttgggaaagctgtgcagcaacctgatggactggccgttctaggtatttttttgaaggttggcagcgctaaaccgggccttcagaaagttgttgatgtgctggattccattaaaacaaagggcaagagtgctgacttcactaacttcgatcctcgtggcctccttcctgaatccctggattactggacctacccaggctcactgaccacccctcctcttctggaatgtgtgacctggattgtgctcaaggaacccatcagcgtcagcagcgagcaggtgttgaaattccgtaaacttaacttcaatggggagggtgaacccgaagaactgatgtttgacaactggcgcccagctcagttgctgaagaacaggcaaatcaaagcttccttcaaaagtctagatggagctactaacttcagcctgctgaagcaggctggagacgtggaggagaaccctggacctttgagcaagggcgaggaggacaacatggccatcatcaaggagttcatgcgcttcaaggtgcacatggagggctccgtgaacggccacgagttcgagatcgagggcgagggcgagggccgcccctacgagggcacccagaccgccaagctgaaggtgaccaagggcggccccctgcccttcgcctgggacatcctgtcccctcagttcatgtacggctccaaggcctacgtgaagcaccccgccgacatccccgactacttgaagctgtccttccccgagggcttcaagtgggagcgcgtgatgaacttcgaggacggcggcgtggtgaccgtgacccaggactcctccctgcaggacggcgagttcatctacaaggtgaagctgcgcggcaccaacttcccctccgacggccccgtaatgcagaagaagaccatgggctgggaggcctcctccgagcggatgtaccccgaggacggcgccctgaagggcgagatcaagcagaggctgaagctgaaggacggcggccactacgacgccgaggtcaagaccacctacaaggccaagaagcccgtgcagctgcccggcgcctacaacgtcaacatcaagctggacatcacctcccacaacgaggactacaccatcgtggaacagtacgagcgcgccgagggccgccactccaccggcggcatggacgagctgtacaagtaa

SEQ ID NO: 210682 - protein, 758 aa, Artificial Sequence
  Description of Artificial Sequence: Synthetic Construct
MVSKGAELFTGIVPILIELNGDVNGHKFSVSGEGEGDATYGKLTLKFICTTGKLPVPWPTLVTTLSYGVQCFSRYPDHMKQHDFFKSAMPEGYIQERTIFFEDDGNYKSRAEVKFEGDTLVNRIELTGTDFKEDGNILGNKMEYNYNAHNVYIMTDKAKNGIKVNFKIRHNIEDGSVQLADHYQQNTPIGDGPVLLPDNHYLSTQSALSKDPNEKRDHMIYFGFVTAAAITHGMDELYKGSSHHWGYGKHNGPEHWHKDFPIAKGERQSPVDIDTHTAKYDPSLKPLSVSYDQATSLRILNNGHAFNVEFLDSQDKAVLKGGPLDGNYRLIQFHFHWGSLDGQGSEHTVDKKKYAAELHLVHWNTKYGDFGKAVQQPDGLAVLGIFLKVGSAKPGLQKVVDVLDSIKTKGKSADFTNFDPRGLLPESLDYWTYPGSLTTPPLLECVTWIVLKEPISVSSEQVLKFRKLNFNGEGEPEELMVDNWRPAQPRKNRQIKASFKSLDGATNFSLLKQAGDVEENPGPLSKGEEDNMAIIKEFMRFKVHMEGSVNGHEFEIEGEGEGRPYEGTQTAKLKVTKGGPLPFAWDILSPQFMYGSKAYVKHPADIPDYLKLSFPEGFKWERVMNFEDGGVVTVTQDSSLQDGEFIYKVKLRGTNFPSDGPVMQKKTMGWEASSERMYPEDGALKGEIKQRLKLKDGGHYDAEVKTTYKAKKPVQLPGAYNVNIKLDITSHNEDYTIVEQYERAEGRHSTGGMDELYK

SEQ ID NO: 210683 - DNA, 2277 bp, Artificial Sequence
  Description of Artificial Sequence: Synthetic Construct
atggtgagcaagggcgccgagctgttcaccggcatcgtgcccatcctgatcgagctgaatggcgatgtgaatggccacaagttcagcgtgagcggcgagggcgagggcgatgccacctacggcaagctgaccctgaagttcatctgcaccaccggcaagctgcctgtgccctggcccaccctggtgaccaccctgagctacggcgtgcagtgcttctcacgctaccccgatcacatgaagcagcacgacttcttcaagagcgccatgcctgagggctacatccaggagcgcaccatcttcttcgaggatgacggcaactacaagtcgcgcgccgaggtgaagttcgagggcgataccctggtgaatcgcatcgagctgaccggcaccgatttcaaggaggatggcaacatcctgggcaataagatggagtacaactacaacgcccacaatgtgtacatcatgaccgacaaggccaagaatggcatcaaggtgaacttcaagatccgccacaacatcgaggatggcagcgtgcagctggccgaccactaccagcagaatacccccatcggcgatggccctgtgctgctgcccgataaccactacctgtccacccagagcgccctgtccaaggaccccaacgagaagcgcgatcacatgatctacttcggcttcgtgaccgccgccgccatcacccacggcatggatgagctgtacaagggatcctcccatcactgggggtacggcaaacacaacggacctgagcactggcataaggacttccccattgccaagggagagcgccagtcccctgttgacatcgacactcatacagccaagtatgacccttccctgaagcccctgtctgtttcctatgatcaagcaacttccctgaggatcctcaacaatggtcatgctttcaacgtggagtttttggactctcaggacaaagcagtgctcaagggaggacccctggatggcaattacagattgattcagtttcactttcactggggttcacttgatggacaaggttcagagcatactgtggataaaaagaaatatgctgcagaacttcacttggttcactggaacaccaaatatggggattttgggaaagctgtgcagcaacctgatggactggccgttctaggtatttttttgaaggttggcagcgctaaaccgggccttcagaaagttgttgatgtgctggattccattaaaacaaagggcaagagtgctgacttcactaacttcgatcctcgtggcctccttcctgaatccctggattactggacctacccaggctcactgaccacccctcctcttctggaatgtgtgacctggattgtgctcaaggaacccatcagcgtcagcagcgagcaggtgttgaaattccgtaaacttaacttcaatggggagggtgaacccgaagaactgatggtggacaactggcgcccagctcagccacggaagaacaggcaaatcaaagcttccttcaaaagcctagatggagctactaacttcagcctgctgaagcaggctggagacgtggaggagaaccctggacctttgagcaagggcgaggaggacaacatggccatcatcaaggagttcatgcgcttcaaggtgcacatggagggctccgtgaacggccacgagttcgagatcgagggcgagggcgagggccgcccctacgagggcacccagaccgccaagctgaaggtgaccaagggcggccccctgcccttcgcctgggacatcctgtcccctcagttcatgtacggctccaaggcctacgtgaagcaccccgccgacatccccgactacttgaagctgtccttccccgagggcttcaagtgggagcgcgtgatgaacttcgaggacggcggcgtggtgaccgtgacccaggactcctccctgcaggacggcgagttcatctacaaggtgaagctgcgcggcaccaacttcccctccgacggccccgtaatgcagaagaagaccatgggctgggaggcctcctccgagcggatgtaccccgaggacggcgccctgaagggcgagatcaagcagaggctgaagctgaaggacggcggccactacgacgccgaggtcaagaccacctacaaggccaagaagcccgtgcagctgcccggcgcctacaacgtcaacatcaagctggacatcacctcccacaacgaggactacaccatcgtggaacagtacgagcgcgccgagggccgccactccaccggcggcatggacgagctgtacaagtaa

SEQ ID NO: 210684 - protein, 758 aa, Artificial Sequence
  Description of Artificial Sequence: Synthetic Construct
MVSKGAELFTGIVPILIELNGDVNGHKFSVSGEGEGDATYGKLTLKFICTTGKLPVPWPTLVTTLSYGVQCFSRYPDHMKQHDFFKSAMPEGYIQERTIFFEDDGNYKSRAEVKFEGDTLVNRIELTGTDFKEDGNILGNKMEYNYNAHNVYIMTDKAKNGIKVNFKIRHNIEDGSVQLADHYQQNTPIGDGPVLLPDNHYLSTQSALSKDPNEKRDHMIYFGFVTAAAITHGMDELYKGSSHHWGYGKHNGPEHWHKDFPIAKGERQSPVDIDTHTAKYDPSLKPLSVSYDQATSLRILNNGHAFNVEFDDSQDKAVLKGGPLDGTYRLIQFHFHWGSLDGQGSEHTVDKKKYAAELHLVHWNTKYGDFGKAVQQPDGLAVLGIFLKVGSAKPGLQKVVDVLDSIKTKGKSADFTNFDPRGSLPESLDYWTYPGSLTTPPLLECVTWIVLKEPISVSSEQVLKFRKLNFNGEGEPEELMVDNWRPAQPLKNRQIKASFKSLDGATNFSLLKQAGDVEENPGPLSKGEEDNMAIIKEFMRFKVHMEGSVNGHEFEIEGEGEGRPYEGTQTAKLKVTKGGPLPFAWDILSPQFMYGSKAYVKHPADIPDYLKLSFPEGFKWERVMNFEDGGVVTVTQDSSLQDGEFIYKVKLRGTNFPSDGPVMQKKTMGWEASSERMYPEDGALKGEIKQRLKLKDGGHYDAEVKTTYKAKKPVQLPGAYNVNIKLDITSHNEDYTIVEQYERAEGRHSTGGMDELYK

SEQ ID NO: 210685 - DNA, 2277 bp, Artificial Sequence
  Description of Artificial Sequence: Synthetic Construct
atggtgagcaagggcgccgagctgttcaccggcatcgtgcccatcctgatcgagctgaatggcgatgtgaatggccacaagttcagcgtgagcggcgagggcgagggcgatgccacctacggcaagctgaccctgaagttcatctgcaccaccggcaagctgcctgtgccctggcccaccctggtgaccaccctgagctacggcgtgcagtgcttctcacgctaccccgatcacatgaagcagcacgacttcttcaagagcgccatgcctgagggctacatccaggagcgcaccatcttcttcgaggatgacggcaactacaagtcgcgcgccgaggtgaagttcgagggcgataccctggtgaatcgcatcgagctgaccggcaccgatttcaaggaggatggcaacatcctgggcaataagatggagtacaactacaacgcccacaatgtgtacatcatgaccgacaaggccaagaatggcatcaaggtgaacttcaagatccgccacaacatcgaggatggcagcgtgcagctggccgaccactaccagcagaatacccccatcggcgatggccctgtgctgctgcccgataaccactacctgtccacccagagcgccctgtccaaggaccccaacgagaagcgcgatcacatgatctacttcggcttcgtgaccgccgccgccatcacccacggcatggatgagctgtacaagggatcctcccatcactgggggtacggcaaacacaacggacctgagcactggcataaggacttccccattgccaagggagagcgccagtcccctgttgacatcgacactcatacagccaagtatgacccttccctgaagcccctgtctgtttcctatgatcaagcaacttccctgaggatcctcaacaatggtcatgctttcaacgtggagtttgatgactctcaggacaaagcagtgctcaagggaggacccctggatggcacttacagattgattcagtttcactttcactggggttcacttgatggacaaggttcagagcatactgtggataaaaagaaatatgctgcagaacttcacttggttcactggaacaccaaatatggggattttgggaaagctgtgcagcaacctgatggactggccgttctaggtatttttttgaaggttggcagcgctaaaccgggccttcagaaagttgttgatgtgctggattccattaaaacaaagggcaagagtgctgacttcactaacttcgatcctcgtggcagtcttcctgaatccctggattactggacctacccaggctcactgaccacccctcctcttctggaatgtgtgacctggattgtgctcaaggaacccatcagcgtcagcagcgagcaggtgttgaaattccgtaaacttaacttcaatggggagggtgaacccgaagaactgatggtggacaactggcgcccagctcagccactgaagaacaggcaaatcaaagcttccttcaaaagcctagatggagctactaacttcagcctgctgaagcaggctggagacgtggaggagaaccctggacctttgagcaagggcgaggaggacaacatggccatcatcaaggagttcatgcgcttcaaggtgcacatggagggctccgtgaacggccacgagttcgagatcgagggcgagggcgagggccgcccctacgagggcacccagaccgccaagctgaaggtgaccaagggcggccccctgcccttcgcctgggacatcctgtcccctcagttcatgtacggctccaaggcctacgtgaagcaccccgccgacatccccgactacttgaagctgtccttccccgagggcttcaagtgggagcgcgtgatgaacttcgaggacggcggcgtggtgaccgtgacccaggactcctccctgcaggacggcgagttcatctacaaggtgaagctgcgcggcaccaacttcccctccgacggccccgtaatgcagaagaagaccatgggctgggaggcctcctccgagcggatgtaccccgaggacggcgccctgaagggcgagatcaagcagaggctgaagctgaaggacggcggccactacgacgccgaggtcaagaccacctacaaggccaagaagcccgtgcagctgcccggcgcctacaacgtcaacatcaagctggacatcacctcccacaacgaggactacaccatcgtggaacagtacgagcgcgccgagggccgccactccaccggcggcatggacgagctgtacaagtaa

SEQ ID NO: 210686 - protein, 759 aa, Artificial Sequence
  Description of Artificial Sequence: Synthetic Construct
MVSKGAELFTGIVPILIELNGDVNGHKFSVSGEGEGDATYGKLTLKFICTTGKLPVPWPTLVTTLSYGVQCFSRYPDHMKQHDFFKSAMPEGYIQERTIFFEDDGNYKSRAEVKFEGDTLVNRIELTGTDFKEDGNILGNKMEYNYNAHNVYIMTDKAKNGIKVNFKIRHNIEDGSVQLADHYQQNTPIGDGPVLLPDNHYLSTQSALSKDPNEKRDHMIYFGFVTAAAITHGMDELYKGSGSHHWGYGKHNGPEHWHKDFPIAKGERQSPVDIDTHTAKYDPSLKPLSVSYDQATSLRILNNGHAFNVEFDDSQDKAVLKGGPLDGTYRLIQFHFHWGSLDGQGSDHTVDKKKYAAELHLVHWNTKYGDFGKAVQQPDGLAVLGIFLKVGSAKPGLQKVVDVLDSIKTKGKSADFTNFDPRGLLPESLDYWTYPGSLTTPPLLESVTWIVLKEPISVSSEQVLKFRKLNFNGEGEPEELMVDNWRPAQPLKNRQIKASFKSLDGATNFSLLKQAGDVEENPGPLSKGEEDNMAIIKEFMRFKVHMEGSVNGHEFEIEGEGEGRPYEGTQTAKLKVTKGGPLPFAWDILSPQFMYGSKAYVKHPADIPDYLKLSFPEGFKWERVMNFEDGGVVTVTQDSSLQDGEFIYKVKLRGTNFPSDGPVMQKKTMGWEASSERMYPEDGALKGEIKQRLKLKDGGHYDAEVKTTYKAKKPVQLPGAYNVNIKLDITSHNEDYTIVEQYERAEGRHSTGGMDELYK

SEQ ID NO: 210687 - DNA, 2280 bp, Artificial Sequence
  Description of Artificial Sequence: Synthetic Construct
atggtgagcaagggcgccgagctgttcaccggcatcgtgcccatcctgatcgagctgaatggcgatgtgaatggccacaagttcagcgtgagcggcgagggcgagggcgatgccacctacggcaagctgaccctgaagttcatctgcaccaccggcaagctgcctgtgccctggcccaccctggtgaccaccctgagctacggcgtgcagtgcttctcacgctaccccgatcacatgaagcagcacgacttcttcaagagcgccatgcctgagggctacatccaggagcgcaccatcttcttcgaggatgacggcaactacaagtcgcgcgccgaggtgaagttcgagggcgataccctggtgaatcgcatcgagctgaccggcaccgatttcaaggaggatggcaacatcctgggcaataagatggagtacaactacaacgcccacaatgtgtacatcatgaccgacaaggccaagaatggcatcaaggtgaacttcaagatccgccacaacatcgaggatggcagcgtgcagctggccgaccactaccagcagaatacccccatcggcgatggccctgtgctgctgcccgataaccactacctgtccacccagagcgccctgtccaaggaccccaacgagaagcgcgatcacatgatctacttcggcttcgtgaccgccgccgccatcacccacggcatggatgagctgtacaagggatccggttcccatcactgggggtacggcaaacacaacggacctgagcactggcataaggacttccccattgccaagggagagcgccagtcccctgttgacatcgacactcatacagccaagtatgacccttccctgaagcccctgtctgtttcctatgatcaagcaacttccctgagaatcctcaacaatggtcatgctttcaacgtggagtttgatgactctcaggacaaagcagtgctcaagggaggacccctggatggcacttacagattgattcagtttcactttcactggggttcacttgatggacaaggttcagaccatactgtggataaaaagaaatatgctgcagaacttcacttggttcactggaacaccaaatatggggattttgggaaagctgtgcagcaacctgatggactggccgttctaggtatttttttgaaggttggcagcgctaaaccgggccttcagaaagttgttgatgtgctggattccattaaaacaaagggcaagagtgctgacttcactaacttcgatcctcgtggcctccttcctgaatccctggattactggacctacccaggctcactgaccacccctcctcttctggaatctgtgacctggattgtgctcaaggaacccatcagcgtcagcagcgagcaggtgttgaaattccgtaaacttaacttcaatggggagggtgaacccgaagaactgatggtggacaactggcgcccagctcagccactgaagaacaggcaaatcaaagcttccttcaaaagtctagatggagctactaacttcagcctgctgaagcaggctggagacgtggaggagaaccctggacctttgagcaagggcgaggaggacaacatggccatcatcaaggagttcatgcgcttcaaggtgcacatggagggctccgtgaacggccacgagttcgagatcgagggcgagggcgagggccgcccctacgagggcacccagaccgccaagctgaaggtgaccaagggcggccccctgcccttcgcctgggacatcctgtcccctcagttcatgtacggctccaaggcctacgtgaagcaccccgccgacatccccgactacttgaagctgtccttccccgagggcttcaagtgggagcgcgtgatgaacttcgaggacggcggcgtggtgaccgtgacccaggactcctccctgcaggacggcgagttcatctacaaggtgaagctgcgcggcaccaacttcccctccgacggccccgtaatgcagaagaagaccatgggctgggaggcctcctccgagcggatgtaccccgaggacggcgccctgaagggcgagatcaagcagaggctgaagctgaaggacggcggccactacgacgccgaggtcaagaccacctacaaggccaagaagcccgtgcagctgcccggcgcctacaacgtcaacatcaagctggacatcacctcccacaacgaggactacaccatcgtggaacagtacgagcgcgccgagggccgccactccaccggcggcatggacgagctgtacaagtaa

SEQ ID NO: 210688 - protein, 759 aa, Artificial Sequence
  Description of Artificial Sequence: Synthetic Construct
MVSKGAELFTGIVPILIELNGDVNGHKFSVSGEGEGDATYGKLTLKFICTTGKLPVPWPTLVTTLSYGVQCFSRYPDHMKQHDFFKSAMPEGYIQERTIFFEDDGNYKSRAEVKFEGDTLVNRIELTGTDFKEDGNILGNKMEYNYNAHNVYIMTDKAKNGIKVNFKIRHNIEDGSVQLADHYQQNTPIGDGPVLLPDNHYLSTQSALSKDPNEKRDHMIYFGFVTAAAITHGMDELYKGSGSHHWGYGKHNGPEHWHKDFPIAKGERQSPVDIDTHTAKYDPSLKPLSVSYDQATSLRILNNGHAFNVEFDDSQDKAVLKGGPLDGTYRLIQFHFHWGSLDGQGSEHTVDKKKYAAELHLVHWNTKYGDFGKAVQQPDGLAVLGIFLKVGSAKPGLQKVVDVLDSIKTKGKSADFTNFDPRGLLPESLDYWTYPGSLTTPPLLESVTSIVLKEPISVSSEQVLKFRKLNFNGEGEPEELMVDNWRPAQPLKNRQIKASFKSLDGATNFSLLKQAGDVEENPGPLSKGEEDNMAIIKEFMRFKVHMEGSVNGHEFEIEGEGEGRPYEGTQTAKLKVTKGGPLPFAWDILSPQFMYGSKAYVKHPADIPDYLKLSFPEGFKWERVMNFEDGGVVTVTQDSSLQDGEFIYKVKLRGTNFPSDGPVMQKKTMGWEASSERMYPEDGALKGEIKQRLKLKDGGHYDAEVKTTYKAKKPVQLPGAYNVNIKLDITSHNEDYTIVEQYERAEGRHSTGGMDELYK

SEQ ID NO: 210689 - DNA, 2280 bp, Artificial Sequence
  Description of Artificial Sequence: Synthetic Construct
atggtgagcaagggcgccgagctgttcaccggcatcgtgcccatcctgatcgagctgaatggcgatgtgaatggccacaagttcagcgtgagcggcgagggcgagggcgatgccacctacggcaagctgaccctgaagttcatctgcaccaccggcaagctgcctgtgccctggcccaccctggtgaccaccctgagctacggcgtgcagtgcttctcacgctaccccgatcacatgaagcagcacgacttcttcaagagcgccatgcctgagggctacatccaggagcgcaccatcttcttcgaggatgacggcaactacaagtcgcgcgccgaggtgaagttcgagggcgataccctggtgaatcgcatcgagctgaccggcaccgatttcaaggaggatggcaacatcctgggcaataagatggagtacaactacaacgcccacaatgtgtacatcatgaccgacaaggccaagaatggcatcaaggtgaacttcaagatccgccacaacatcgaggatggcagcgtgcagctggccgaccactaccagcagaatacccccatcggcgatggccctgtgctgctgcccgataaccactacctgtccacccagagcgccctgtccaaggaccccaacgagaagcgcgatcacatgatctacttcggcttcgtgaccgccgccgccatcacccacggcatggatgagctgtacaagggatccggttcccatcactgggggtacggcaaacacaacggacctgagcactggcataaggacttccccattgccaagggagagcgccagtcccctgttgacatcgacactcatacagccaagtatgacccttccctgaagcccctgtctgtttcctatgatcaagcaacttccctgagaatcctcaacaatggtcatgctttcaacgtggagtttgatgactctcaggacaaagcagtgctcaagggaggacccctggatggcacttacagattgattcagtttcactttcactggggttcacttgatggacaaggttcagagcatactgtggataaaaagaaatatgctgcagaacttcacttggttcactggaacaccaaatatggggattttgggaaagctgtgcagcaacctgatggactggccgttctaggtatttttttgaaggttggcagcgctaaaccgggccttcagaaagttgttgatgtgctggattccattaaaacaaagggcaagagtgctgacttcactaacttcgatcctcgtggcctccttcctgaatccctggattactggacctacccaggctcactgaccacccctcctcttctggaatctgtgaccagcattgtgctcaaggaacccatcagcgtcagcagcgagcaggtgttgaaattccgtaaacttaacttcaatggggagggtgaacccgaagaactgatggtggacaactggcgcccagctcagccactgaagaacaggcaaatcaaagcttccttcaaaagtctagatggagctactaacttcagcctgctgaagcaggctggagacgtggaggagaaccctggacctttgagcaagggcgaggaggacaacatggccatcatcaaggagttcatgcgcttcaaggtgcacatggagggctccgtgaacggccacgagttcgagatcgagggcgagggcgagggccgcccctacgagggcacccagaccgccaagctgaaggtgaccaagggcggccccctgcccttcgcctgggacatcctgtcccctcagttcatgtacggctccaaggcctacgtgaagcaccccgccgacatccccgactacttgaagctgtccttccccgagggcttcaagtgggagcgcgtgatgaacttcgaggacggcggcgtggtgaccgtgacccaggactcctccctgcaggacggcgagttcatctacaaggtgaagctgcgcggcaccaacttcccctccgacggccccgtaatgcagaagaagaccatgggctgggaggcctcctccgagcggatgtaccccgaggacggcgccctgaagggcgagatcaagcagaggctgaagctgaaggacggcggccactacgacgccgaggtcaagaccacctacaaggccaagaagcccgtgcagctgcccggcgcctacaacgtcaacatcaagctggacatcacctcccacaacgaggactacaccatcgtggaacagtacgagcgcgccgagggccgccactccaccggcggcatggacgagctgtacaagtaa

SEQ ID NO: 210690 - protein, 759 aa, Artificial Sequence
  Description of Artificial Sequence: Synthetic Construct
MVSKGAELFTGIVPILIELNGDVNGHKFSVSGEGEGDATYGKLTLKFICTTGKLPVPWPTLVTTLSYGVQCFSRYPDHMKQHDFFKSAMPEGYIQERTIFFEDDGNYKSRAEVKFEGDTLVNRIELTGTDFKEDGNILGNKMEYNYNAHNVYIMTDKAKNGIKVNFKIRHNIEDGSVQLADHYQQNTPIGDGPVLLPDNHYLSTQSALSKDPNEKRDHMIYFGFVTAAAITHGMDELYKGSGSHHWGYGKHNGPEHWHKDFPIAKGERQSPVDIDTHTAKYDPSLKPLSVSYDQATSLRILNNGHAFNVEFDDSQDKAVLKGGPLDGTYRLIQFHFHWGSLDGQGSEHTVDKKKYAAELHLVHWNTKYGDFGKAVQQPDGLAVLGIFLKVGSAKPGLQKVVDVLDSIKTKGKSADFTNFDPRGLLPESLDYWTYPGSLTTPPLLESVTWIVLKEPISVSSEQVLKFRKLNFNGEGEPEELMVDNWRPAQPLKNRQIKASFKSLDGATNFSLLKQAGDVEENPGPLSKGEEDNMAIIKEFMRFKVHMEGSVNGHEFEIEGEGEGRPYEGTQTAKLKVTKGGPLPFAWDILSPQFMYGSKAYVKHPADIPDYLKLSFPEGFKWERVMNFEDGGVVTVTQDSSLQDGEFIYKVKLRGTNFPSDGPVMQKKTMGWEASSERMYPEDGALKGEIKQRLKLKDGGHYDAEVKTTYKAKKPVQLPGAYNVNIKLDITSHNEDYTIVEQYERAEGRHSTGGMDELYK

SEQ ID NO: 210691 - DNA, 2280 bp, Artificial Sequence
  Description of Artificial Sequence: Synthetic Construct
atggtgagcaagggcgccgagctgttcaccggcatcgtgcccatcctgatcgagctgaatggcgatgtgaatggccacaagttcagcgtgagcggcgagggcgagggcgatgccacctacggcaagctgaccctgaagttcatctgcaccaccggcaagctgcctgtgccctggcccaccctggtgaccaccctgagctacggcgtgcagtgcttctcacgctaccccgatcacatgaagcagcacgacttcttcaagagcgccatgcctgagggctacatccaggagcgcaccatcttcttcgaggatgacggcaactacaagtcgcgcgccgaggtgaagttcgagggcgataccctggtgaatcgcatcgagctgaccggcaccgatttcaaggaggatggcaacatcctgggcaataagatggagtacaactacaacgcccacaatgtgtacatcatgaccgacaaggccaagaatggcatcaaggtgaacttcaagatccgccacaacatcgaggatggcagcgtgcagctggccgaccactaccagcagaatacccccatcggcgatggccctgtgctgctgcccgataaccactacctgtccacccagagcgccctgtccaaggaccccaacgagaagcgcgatcacatgatctacttcggcttcgtgaccgccgccgccatcacccacggcatggatgagctgtacaagggatccggttcccatcactgggggtacggcaaacacaacggacctgagcactggcataaggacttccccattgccaagggagagcgccagtcccctgttgacatcgacactcatacagccaagtatgacccttccctgaagcccctgtctgtttcctatgatcaagcaacttccctgagaatcctcaacaatggtcatgctttcaacgtggagtttgatgactctcaggacaaagcagtgctcaagggaggacccctggatggcacttacagattgattcagtttcactttcactggggttcacttgatggacaaggttcagagcatactgtggataaaaagaaatatgctgcagaacttcacttggttcactggaacaccaaatatggggattttgggaaagctgtgcagcaacctgatggactggccgttctaggtatttttttgaaggttggcagcgctaaaccgggccttcagaaagttgttgatgtgctggattccattaaaacaaagggcaagagtgctgacttcactaacttcgatcctcgtggcctccttcctgaatccctggattactggacctacccaggctcactgaccacccctcctcttctggaatctgtgacctggattgtgctcaaggaacccatcagcgtcagcagcgagcaggtgttgaaattccgtaaacttaacttcaatggggagggtgaacccgaagaactgatggtggacaactggcgcccagctcagccactgaagaacaggcaaatcaaagcttccttcaaaagtctagatggagctactaacttcagcctgctgaagcaggctggagacgtggaggagaaccctggacctttgagcaagggcgaggaggacaacatggccatcatcaaggagttcatgcgcttcaaggtgcacatggagggctccgtgaacggccacgagttcgagatcgagggcgagggcgagggccgcccctacgagggcacccagaccgccaagctgaaggtgaccaagggcggccccctgcccttcgcctgggacatcctgtcccctcagttcatgtacggctccaaggcctacgtgaagcaccccgccgacatccccgactacttgaagctgtccttccccgagggcttcaagtgggagcgcgtgatgaacttcgaggacggcggcgtggtgaccgtgacccaggactcctccctgcaggacggcgagttcatctacaaggtgaagctgcgcggcaccaacttcccctccgacggccccgtaatgcagaagaagaccatgggctgggaggcctcctccgagcggatgtaccccgaggacggcgccctgaagggcgagatcaagcagaggctgaagctgaaggacggcggccactacgacgccgaggtcaagaccacctacaaggccaagaagcccgtgcagctgcccggcgcctacaacgtcaacatcaagctggacatcacctcccacaacgaggactacaccatcgtggaacagtacgagcgcgccgagggccgccactccaccggcggcatggacgagctgtacaagtaa

SEQ ID NO: 210692 - protein, 747 aa, Artificial Sequence
  Description of Artificial Sequence: Synthetic Construct
MALPVTALLLPLALLLHAARPDIQMTQTTSSLSASLGDRVTISCRASQDISKYLNWYQQKPDGTVKLLIYHTSRLHSGVPSRFSGSGSGTDYSLTISNLEQEDIATYFCQQGNTLPYTFGGGTKLEITGGGGSGGGGSGGGGSEVKLQESGPGLVAPSQSLSVTCTVSGVSLPDYGVSWIRQPPRKGLEWLGVIWGSETTYYNSALKSRLTIIKDNSKSQVFLKMNSLQTDDTAIYYCAKHYYYGGSYAMDYWGQGTSVTVSSTTTPAPRPPTPAPTIASQPLSLRPEACRPAAGGAVHTRGLDFACDIYIWAPLAGTCGVLLLSLVITLYCKRGRKKLLYIFKQPFMRPVQTTQEEDGCSCRFPEEEEGGCELRVKFSRSADAPAYKQGQNQLYNELNLGRREEYDVLDKRRGRDPEMGGKPRRKNPQEGLYNELQKDKMAEAYSEIGMKGERRRGKGHDGLYQGLSTATKDTYDALHMQALPPRGSSHHWGYGKHNGPEHWHKDFPIAKGERQSPVDIDTHTAKYDPSLKPLSVSYDQATSLRNLNNGHAFNVEFDDSQDKAVLKGGPLDGTYRLIQFHFHWGSLDRQGSEHTVDKKKYAAELHLVHWNTKYGDFGKAVQQPDGLAVLGIFLKVGSAKPGLQKVVDVLDSIKTKGKSADFTNFDPRGLLPESLDYWTYPGSLTTPPLLECVTWIVLKEPISVSSEQVLKFRKLNFNGEGEPEELMVDNWRPAQPLKNRQIKASFK

SEQ ID NO: 210693 - DNA, 2244 bp, Artificial Sequence
  Description of Artificial Sequence: Synthetic Construct
atggccttaccagtgaccgccttgctcctgccgctggccttgctgctccacgccgccaggccggacatccagatgacacagactacatcctccctgtctgcctctctgggagacagagtcaccatcagttgcagggcaagtcaggacattagtaaatatttaaattggtatcagcagaaaccagatggaactgttaaactcctgatctaccatacatcaagattacactcaggagtcccatcaaggttcagtggcagtgggtctggaacagattattctctcaccattagcaacctggagcaagaagatattgccacttacttttgccaacagggtaatacgcttccgtacacgttcggaggggggaccaagctggagatcacaggtggcggtggctcgggcggtggtgggtcgggtggcggcggatctgaggtgaaactgcaggagtcaggacctggcctggtggcgccctcacagagcctgtccgtcacatgcactgtctcaggggtctcattacccgactatggtgtaagctggattcgccagcctccacgaaagggtctggagtggctgggagtaatatggggtagtgaaaccacatactataattcagctctcaaatccagactgaccatcatcaaggacaactccaagagccaagttttcttaaaaatgaacagtctgcaaactgatgacacagccatttactactgtgccaaacattattactacggtggtagctatgctatggactactggggccaaggaacctcagtcaccgtctcctcaaccacgacgccagcgccgcgaccaccaacaccggcgcccaccatcgcgtcgcagcccctgtccctgcgcccagaggcgtgccggccagcggcggggggcgcagtgcacacgagggggctggacttcgcctgtgatatctacatctgggcgcccttggccgggacttgtggggtccttctcctgtcactggttatcaccctttactgcaaacggggcagaaagaaactcctgtatatattcaaacaaccatttatgagaccagtacaaactactcaagaggaagatggctgtagctgccgatttccagaagaagaagaaggaggatgtgaactgagagtgaagttcagcaggagcgcagacgcccccgcgtacaagcagggccagaaccagctctataacgagctcaatctaggacgaagagaggagtacgatgttttggacaagagacgtggccgggaccctgagatggggggaaagccgagaaggaagaaccctcaggaaggcctgtacaatgaactgcagaaagataagatggcggaggcctacagtgagattgggatgaaaggcgagcgccggaggggcaaggggcacgatggcctttaccagggtctcagtacagccaccaaggacacctacgacgcccttcacatgcaggccctgccccctcgcggatcctcccatcactgggggtacggcaaacacaacggacctgagcactggcataaggacttccccattgccaagggagagcgccagtcccctgttgacatcgacactcatacagccaagtatgacccttccctgaagcccctgtctgtttcctatgatcaagcaacttccctgagaaacctcaacaatggtcatgctttcaacgtggagtttgatgactctcaggacaaagcagtgctcaagggaggacccctggatggcacttacagattgattcagtttcactttcactggggttcacttgatcgacaaggttcagagcatactgtggataaaaagaaatatgctgcagaacttcacttggttcactggaacaccaaatatggggattttgggaaagctgtgcagcaacctgatggactggccgttctaggtatttttttgaaggttggcagcgctaaaccgggccttcagaaagttgttgatgtgctggattccattaaaacaaagggcaagagtgctgacttcactaacttcgatcctcgtggcctccttcctgaatccctggattactggacctacccaggctcactgaccacccctcctcttctggaatgtgtgacctggattgtgctcaaggaacccatcagcgtcagcagcgagcaggtgttgaaattccgtaaacttaacttcaatggggagggtgaacccgaagaactgatggtggacaactggcgcccagctcagccactgaagaacaggcaaatcaaagcttccttcaaatga

SEQ ID NO: 210694 - protein, 747 aa, Artificial Sequence
  Description of Artificial Sequence: Synthetic Construct
MALPVTALLLPLALLLHAARPDIQMTQTTSSLSASLGDRVTISCRASQDISKYLNWYQQKPDGTVKLLIYHTSRLHSGVPSRFSGSGSGTDYSLTISNLEQEDIATYFCQQGNTLPYTFGGGTKLEITGGGGSGGGGSGGGGSEVKLQESGPGLVAPSQSLSVTCTVSGVSLPDYGVSWIRQPPRKGLEWLGVIWGSETTYYNSALKSRLTIIKDNSKSQVFLKMNSLQTDDTAIYYCAKHYYYGGSYAMDYWGQGTSVTVSSTTTPAPRPPTPAPTIASQPLSLRPEACRPAAGGAVHTRGLDFACDIYIWAPLAGTCGVLLLSLVITLYCKRGRKKLLYIFKQPFMRPVQTTQEEDGCSCRFPEEEEGGCELRVKFSRSADAPAYKQGQNQLYNELNLGRREEYDVLDKRRGRDPEMGGKPRRKNPQEGLYNELQKDKMAEAYSEIGMKGERRRGKGHDGLYQGLSTATKDTYDALHMQALPPRGSSHHWGYGKHNGPEHWHKDFPIAKGERQSPVDIDTHTAKYDPSLKPLSVSYDQATSLRILNNGHAFNVEFDDSQDKAVLKGGPLDGTYRLIQFHFHWGSLDGQGSEHTVDKKKYAAELHLVHWNTKYGDFGKAVQQPDGLAVLGIFLKVGSAKPGHQKVVDVLDSIKTKGKSADFTNFDPRGLLPESLDYWTYPGSLTTPPLLECVTWIVLKEPISVSSEQVLKFRKLNFNGEGEPEELMVDNWRPAQPLKNRQIKASFK

SEQ ID NO: 210695 - DNA, 2244 bp, Artificial Sequence
  Description of Artificial Sequence: Synthetic Construct
atggccttaccagtgaccgccttgctcctgccgctggccttgctgctccacgccgccaggccggacatccagatgacacagactacatcctccctgtctgcctctctgggagacagagtcaccatcagttgcagggcaagtcaggacattagtaaatatttaaattggtatcagcagaaaccagatggaactgttaaactcctgatctaccatacatcaagattacactcaggagtcccatcaaggttcagtggcagtgggtctggaacagattattctctcaccattagcaacctggagcaagaagatattgccacttacttttgccaacagggtaatacgcttccgtacacgttcggaggggggaccaagctggagatcacaggtggcggtggctcgggcggtggtgggtcgggtggcggcggatctgaggtgaaactgcaggagtcaggacctggcctggtggcgccctcacagagcctgtccgtcacatgcactgtctcaggggtctcattacccgactatggtgtaagctggattcgccagcctccacgaaagggtctggagtggctgggagtaatatggggtagtgaaaccacatactataattcagctctcaaatccagactgaccatcatcaaggacaactccaagagccaagttttcttaaaaatgaacagtctgcaaactgatgacacagccatttactactgtgccaaacattattactacggtggtagctatgctatggactactggggccaaggaacctcagtcaccgtctcctcaaccacgacgccagcgccgcgaccaccaacaccggcgcccaccatcgcgtcgcagcccctgtccctgcgcccagaggcgtgccggccagcggcggggggcgcagtgcacacgagggggctggacttcgcctgtgatatctacatctgggcgcccttggccgggacttgtggggtccttctcctgtcactggttatcaccctttactgcaaacggggcagaaagaaactcctgtatatattcaaacaaccatttatgagaccagtacaaactactcaagaggaagatggctgtagctgccgatttccagaagaagaagaaggaggatgtgaactgagagtgaagttcagcaggagcgcagacgcccccgcgtacaagcagggccagaaccagctctataacgagctcaatctaggacgaagagaggagtacgatgttttggacaagagacgtggccgggaccctgagatggggggaaagccgagaaggaagaaccctcaggaaggcctgtacaatgaactgcagaaagataagatggcggaggcctacagtgagattgggatgaaaggcgagcgccggaggggcaaggggcacgatggcctttaccagggtctcagtacagccaccaaggacacctacgacgcccttcacatgcaggccctgccccctcgcggatcctcccatcactgggggtacggcaaacacaacggacctgagcactggcataaggacttccccattgccaagggagagcgccagtcccctgttgacatcgacactcatacagccaagtatgacccttccctgaagcccctgtctgtttcctatgatcaagcaacttccctgagaatcctcaacaatggtcatgctttcaacgtggagtttgatgactctcaggacaaagcagtgctcaagggaggacccctggatggcacttacagattgattcagtttcactttcactggggttcacttgatggacaaggttcagagcatactgtggataaaaagaaatatgctgcagaacttcacttggttcactggaacaccaaatatggggattttgggaaagctgtgcagcaacctgatggactggccgttctaggtatttttttgaaggttggcagcgctaaaccgggccatcagaaagttgttgatgtgctggattccattaaaacaaagggcaagagtgctgacttcactaacttcgatcctcgtggcctccttcctgaatccctggattactggacctacccaggctcactgaccacccctcctcttctggaatgtgtgacctggattgtgctcaaggaacccatcagcgtcagcagcgagcaggtgttgaaattccgtaaacttaacttcaatggggagggtgaacccgaagaactgatggtggacaactggcgcccagctcagccactgaagaacaggcaaatcaaagcttccttcaaatga

SEQ ID NO: 210696 - protein, 22 aa, Artificial Sequence
  Description of Artificial Sequence: Synthetic Destabilizing Domain (DD)
LMVDNWRPAQPLKNRQIKASFK

SEQ ID NO: 210697 - DNA, 708 bp, Artificial Sequence
  Description of Artificial Sequence: Synthetic Destabilizing Domain (DD)
tcccatcactgggggtacggcaaacacaacggacctgagcactggcataaggacttccccattgccaagggagagcgccagtcccctgttgacatcgacactcatacagccaagtatgacccttccctgaagcccctgtctgtttcctatgatcaagcaacttccctgaggatcctcaacaatggtcatgctttcaacgtggagtttgatgactctcaggacaaagcagtgctcaagggaggacccctggatggcacttacagattgattcagtttcactttcactggggttcacttgatggacaaggttcagagcatactgtggataaaaagaaatatgctgcagaacttcacttggttcactggaacaccaaatatggggattttgggaaagctgtgcagcaacctgatggactggccgttctaggtatttttttgaaggttggcagcgctaaaccgggccttcagaaagttgttgatgtgctggattccattaaaacaaagggcaagagtgctgacttcactaacttcgatcctcgtggcctccttcctgaatccctggattactggacctacccaggctcactgaccacccctcctcttctggaatgtgtgacctggattgtgctcaaggaacccatcagcgtcagcagcgagcaggtgttgaaattccgtaaacttaacttcaatggggagggtgaacccgaa

SEQ ID NO: 210698 - protein, 259 aa, Artificial Sequence
  Description of Artificial Sequence: Synthetic Destabilizing Domain (DD)
SHHWGYGKHNGPEHWHKDFPIAKGERQSPVDIDTQTAKYDPTLKPLSVSFDQATSLRILNNGHAFDVEFDDSQDKAVLKGGPLDGTYRLIQFHFHWGSLDGQGSEHTVDKKKYAAELHLVHWNTKYGDFWKAVQQPDGLAVLGIFLKVGSAKPGLQKVVDVLDSIKTKGKSADFTNFDPRGLLPESLDYWTYPGSLTTPPLLECVTWIVLKEPISVSSEQVLKFHKLNFNGEGEPEELMVDNWRPAQPLKNRQIKASFK

SEQ ID NO: 210699 - DNA, 777 bp, Artificial Sequence
  Description of Artificial Sequence: Synthetic Destabilizing Domain (DD)
tcccatcactgggggtacggcaaacacaacggacctgaacactggcataaggacttccccattgccaagggagagcgccagtcccctgttgacatcgacactcaaacagccaagtatgaccctaccctgaagcccctgtctgtttcctttgatcaagcaacttccctgaggatcctcaataatggtcatgctttcgacgtggagtttgatgactctcaggacaaagcagtgctcaagggaggacccctggatggcacttacagattgattcagtttcactttcactggggttcacttgatggacaaggttcagagcatactgtggataaaaagaaatatgctgcagaacttcacttggttcactggaacaccaaatatggggatttttggaaagctgtgcagcaacctgatggactggccgttctaggtatttttttgaaggttggcagcgctaaaccgggccttcagaaagttgttgatgtgctggattccattaaaacaaagggcaagagtgctgacttcactaacttcgatcctcgtggcctccttcctgaatccctggattactggacctacccaggctcactgaccacccctcctcttctggaatgtgtgacctggattgtgctcaaggaacccatcagcgtcagcagcgagcaggtgttgaaattccataaacttaacttcaatggggagggtgaacccgaagaactgatggtggacaactggcgcccagctcagccactgaagaacaggcaaatcaaagcttccttcaaa

SEQ ID NO: 210700 - protein, 259 aa, Artificial Sequence
  Description of Artificial Sequence: Synthetic Destabilizing Domain (DD)
SHHWGYGKHNGPEHWHKDFPIAKGERQSPVDIDTHTAKYDPSLKPLSVSYDQATSLRILNNGHAFNVEIDDSQDKAVLKGGPLDGTYRLIQFHFHWGSLDGQGSEHTVDKKKYAAELHLVHWNTKYGDFGKAVQQPDGLAVLGIVLKVGSAKPGLQKVVDVLDSIKTKGKSADFTNFDPRGLLPESLDYWTYPGSLTTPPLLECVTWIVLKEPISVSSEQVLKFRKLNFNGEGEPEELMVDNWRPAQPLKNRQIKASFK

SEQ ID NO: 210701 - DNA, 777 bp, Artificial Sequence
  Description of Artificial Sequence: Synthetic Destabilizing Domain (DD)
tcccatcactgggggtacggcaaacacaacggacctgagcactggcataaggacttccccattgccaagggagagcgccagtcccctgttgacatcgacactcatacagctaagtatgacccttccctgaagcccctgtctgtttcctatgatcaagcaacttccctgaggatcctcaacaatggtcatgctttcaacgtggagattgatgactctcaggacaaagcggtgctcaagggaggacccctggatggcacttacagattgattcagtttcactttcactggggttcacttgatggacaaggttcagagcatactgtggataaaaagaaatatgctgcagaacttcacttggttcactggaacaccaaatatggggattttgggaaagctgtgcagcaacctgatggactggccgttctaggtattgttttgaaggttggcagcgctaaaccgggccttcagaaagttgttgatgtgctggattccattaaaacaaagggcaagagtgctgacttcactaacttcgatcctcgtggcctccttcctgaatccctggattactggacctacccaggctcactgaccacccctcctcttctggaatgtgtgacctggattgtgctcaaggaacccatcagcgtcagcagcgagcaggtgttgaaattccgtaaacttaacttcaatggggagggtgaacccgaagaactgatggtggacaactggcgcccagctcagccactgaagaacaggcaaatcaaagcttccttcaaa

SEQ ID NO: 210702 - protein, 259 aa, Artificial Sequence
  Description of Artificial Sequence: Synthetic Destabilizing Domain (DD)
SHHWGYGKHNGPEHWHKDFPIAKGELQSPVDIDTHTAKYDPSLKPLSVSYDQATSLRILNNGHAFNVEFDDSQDKAVLKGGPLDGIYRLIQFHFHWGSLDGQGSEHTVDKKKYAAELHLVYWNTKYGDFGKAVQQPDGLAVLGIFLKVGSAKPGLQKVVDVLDSIKTKGKSADFTNFDPRGLLPESLDYWTYPGSLTTPPLLECVTWIVLKEPISVSSEQVLKFRKLNFNGEGEPEELMVDNWRPAQPLKDRQIKASFK

SEQ ID NO: 210703 - DNA, 777 bp, Artificial Sequence
  Description of Artificial Sequence: Synthetic Destabilizing Domain (DD)
tcccatcactgggggtacggcaaacacaacggacctgagcactggcataaggacttccccattgccaagggagagctccagtcccctgttgacatcgacactcatacagccaagtatgacccttccctgaagcccctgtctgtttcctatgatcaagcaacttccctgaggatcctcaacaatggtcatgctttcaacgtggagtttgatgactctcaggacaaagcagtgctcaagggaggacccctggatggcatttacagattgattcagtttcactttcactggggttcacttgatggacaaggttcagagcatactgtggataaaaagaaatatgctgcagaacttcacttggtttactggaacaccaaatatggggattttgggaaagctgtgcagcaacctgatggactggccgttctaggtatttttttgaaggttggcagcgctaaaccgggccttcagaaagttgttgatgtgctggattccattaaaacaaagggcaagagtgctgacttcactaacttcgatcctcgtggcctccttcctgaatccctggattactggacctacccaggctcactgaccacccctcctcttctggaatgtgtgacctggattgtgctcaaggaacccatcagcgtcagcagcgagcaggtgttgaaattccgtaaacttaacttcaatggggagggtgaacccgaagaactgatggtggacaactggcgcccagctcagccactgaaggacaggcaaatcaaagcttccttcaaa

SEQ ID NO: 210704 - protein, 259 aa, Artificial Sequence
  Description of Artificial Sequence: Synthetic Destabilizing Domain (DD)
SHHWGYGKHNGPEHWHKDFPIAKGERQSPVDIDTHTAKYDPSLNPLSVSYDQATSLRILNNGHAFNLEFDDSQDKAVLKGGPLDGTYRLIQFHFHWGSLDGQGSEHTVDKKKYAAELYLVHWNTKYGDFGKAVQQPDGLAVLGIFLKVGSAKPGLQKVVDVLDSIKTRGKSADFTNFEPRGLLPESLDYWTYPGSLTTPPLLECVTWIVLKEPISVSSEQVLKFRKLNFNGEGEPEELMVDNWRPAQPLKNRQIKASFK

SEQ ID NO: 210705 - DNA, 777 bp, Artificial Sequence
  Description of Artificial Sequence: Synthetic Destabilizing Domain (DD)
tcccatcactgggggtacggcaaacacaacggacctgagcactggcataaggacttccccattgccaaaggagagcgccagtcccctgttgacatcgacactcatacagccaagtatgacccttccctgaatcccctgtctgtttcctatgatcaagcaacttccctgaggatcctcaacaatggtcatgctttcaacttggagtttgatgactctcaggacaaagcagtgctcaagggaggacccctggatggcacttacagattgattcagtttcactttcactggggttcacttgatggacaaggttcagagcatactgtggataaaaagaaatatgctgcagaactttacttggttcactggaacaccaaatatggggattttgggaaagctgtgcagcaacctgatggactggccgttctaggtatttttttgaaggttggcagcgctaaaccgggccttcagaaagttgttgatgtgctggattccattaaaacaaggggcaagagtgctgacttcactaacttcgaacctcgtggcctccttcctgaatccctggattactggacctacccaggctcactgaccacccctcctcttctggaatgtgtgacctggattgtgctcaaggaacccatcagcgtcagcagcgagcaggtgttgaaattccgaaaacttaacttcaatggggagggtgaacccgaagaactgatggtggacaactggcgcccagctcagccactgaagaacaggcaaatcaaagcttccttcaaa

SEQ ID NO: 210706 - protein, 259 aa, Artificial Sequence
  Description of Artificial Sequence: Synthetic Destabilizing Domain (DD)
SHHWGYGKHNGPELWHKDFPIAKGERQSPVDIDTHTAKYDPSLKPLSVSYDQVTSLRILNNGHAFNVEFDDSQDKAVLKGGPLDGTYRLIQFHFHWGSLDGQGSEHTVDEKKYAAELHLVHWNTKYGDFGKAVQQPDGLAVLGIFLKVGSAKPGLQKVVDVLDSIKTKGKSADFTNFDPRGLLPESLDYWTYPGSLTTPPLLECVTWIVLKEPISVSSKQVLKIRKLNFNGEGEPEELMVDNWRPAQPLKNRQIKASFK

SEQ ID NO: 210707 - DNA, 777 bp, Artificial Sequence
  Description of Artificial Sequence: Synthetic Destabilizing Domain (DD)
tcccatcactgggggtacggcaaacacaacggacctgagctctggcataaggacttccccattgccaagggagagcgccagtcccctgttgacatcgacactcatacagccaagtatgacccttccctgaagcccctgtctgtttcctatgatcaagtaacttccctgaggatcctcaacaatggtcatgctttcaacgtggagtttgatgactctcaggacaaagcagtgctcaagggaggacccctggatggcacttacagattgattcagtttcactttcactggggttcacttgatggacaaggttcagagcatactgtggatgaaaagaaatatgctgcagaacttcacttggttcactggaacaccaaatatggggattttgggaaagctgtgcagcaacctgatggactggccgttctaggtatttttttgaaggttggcagcgctaaaccgggccttcagaaagttgttgatgtgctggattccattaaaacaaagggcaagagtgctgacttcactaacttcgatcctcgtggcctccttcctgaatccctggattactggacctacccaggctcactgaccacccctcctcttctggaatgtgtgacctggattgtgctcaaggaacccatcagcgtcagcagcaagcaggtgttgaaaatccgtaaacttaacttcaatggggagggtgaacccgaagaactgatggtggacaactggcgcccagctcagccactgaagaacaggcaaatcaaagcttccttcaaa

SEQ ID NO: 210708 - protein, 259 aa, Artificial Sequence
  Description of Artificial Sequence: Synthetic Destabilizing Domain (DD)
SHHWGYGKHNGSEHWHKDFPIAKGERQSPVDIDTHTAKYDPSLKPLSVSYDQATSLRILNNGHAFNVEFDDSQDKAVLKGGALDGTYRLIQFHFHWGSLGGQGSEHTVDNKKYAAELHLVHWNTKYGDFGKAVQQPDGLAVLGIFLKVGSAKPGLQKVVDVLDSIKTKGKSADFTNFDPRGLLPESLDYWTYPGSLTTPPLLECVTWIVLKEPISVSSEQVLKFRKLNINGEGEPEELMVDNWRPAQPLKNRQIKASFK

SEQ ID NO: 210709 - DNA, 777 bp, Artificial Sequence
  Description of Artificial Sequence: Synthetic Destabilizing Domain (DD)
tcccatcactgggggtacggcaaacacaacggatctgagcactggcataaggacttccccattgccaagggagagcgccagtcccctgttgacatcgacactcatacagccaagtatgacccttccctgaagcccctgtctgtttcatatgatcaagcaacttccctgaggatcctcaacaatggtcatgctttcaacgtggagtttgatgactctcaggacaaagcagtgctcaagggaggagccctggatggcacttacagattgattcagtttcactttcactggggttcacttggtggacaaggttcagagcatactgtggataacaagaaatatgctgcagaacttcacttggttcactggaacaccaaatatggggattttgggaaagctgtgcagcaacctgatggactggccgttctaggtatttttttgaaggttggcagcgctaaaccgggccttcagaaagttgttgatgtgctggattccattaaaacaaagggcaagagtgctgacttcactaacttcgatcctcgtggcctccttcctgaatccctggattactggacctacccaggctcactgaccacccctcctcttctggaatgtgtgacctggattgtgctcaaggaacccatcagcgtcagcagcgagcaggtgttgaaattccgtaaacttaacatcaatggggagggtgaacccgaagaattgatggtggacaactggcgcccagctcagccactgaagaacaggcaaatcaaagcttccttcaaa

SEQ ID NO: 210710 - protein, 259 aa, Artificial Sequence
  Description of Artificial Sequence: Synthetic Destabilizing Domain (DD)
SHHWGYGKHNGPEHWHKDFPIAKGERQSPVDIDTHTAKYDPSLKPRSVSYDQATSLRILNNGHAFNVEFDDSQDKAVLKGGPLDGTYRLIQFHFHWGSLDGQGSEHTVDKKKYAAELHLVHWNTKYGDFGKAVQQPDGLAVLGIFLKVGSAKPGLQKVVDVLDSIKTKGKSADFTNFDPRGLLPESLDYWTYPGSLTTPPLLECVTWIVLKEPISVSSEQVLKFRKLNFNGEGEPEELMVDNWRPAQPLKNRQIKASFK

SEQ ID NO: 210711 - DNA, 777 bp, Artificial Sequence
  Description of Artificial Sequence: Synthetic Destabilizing Domain (DD)
tcccatcactgggggtacggcaaacacaacggacctgagcactggcataaggacttccccattgccaagggagagcgccagtcccctgttgacatcgacactcatacagccaagtatgacccttccctgaagccccggtctgtttcctatgatcaagcaacttccctgaggatcctcaacaatggtcatgctttcaacgtggagtttgatgactctcaggacaaagcagtgctcaagggaggacccctggatggcacttacagattgattcagtttcactttcactggggttcacttgatggacaaggttcagagcatactgtggataaaaagaaatatgctgcagaacttcacttggttcactggaacaccaaatatggggattttgggaaagctgtgcagcaacctgatggactggccgttctaggtatttttttgaaggttggcagcgctaaaccgggccttcagaaagttgttgatgtgctggattccattaaaacaaagggcaagagtgctgacttcactaacttcgatcctcgtggcctccttcctgaatccctggattactggacctacccaggctcactgaccacccctcctcttctggaatgtgtgacctggattgtgctcaaggaacccatcagcgtcagcagcgagcaggtgttgaaattccgtaaacttaacttcaatggggagggtgaacccgaagaactgatggtggacaactggcgcccagctcagccactgaagaacaggcaaatcaaagcttccttcaaa

SEQ ID NO: 210712 - protein, 259 aa, Artificial Sequence
  Description of Artificial Sequence: Synthetic Destabilizing Domain (DD)
SHHWGYGKHNGPEHWHKDFPIAKGERQSPVDIDTHTAKYDPSLKPLSVSYDQATSLRILNNDHAFNVEFDDSQDKAVLKGGPLDGTYRLIQFHFHWGSLDGQGSEHTVDKKKYAAELHLVHRNTKYGDFGKAVQQPDGLAVLGIFLKVGSAKPGLQKVVDVLDSIKTKGKSADFTNFDPRGLLPESLDYWTYPGSLTTPPLLECVTWIVLKEPISVSSKQVLKFRKLNFNGEGEPEELMVDNWRPAQPLKNRQIKASFK

SEQ ID NO: 210713 - DNA, 777 bp, Artificial Sequence
  Description of Artificial Sequence: Synthetic Destabilizing Domain (DD)
tcccatcactgggggtacggcaaacacaacggacctgagcactggcataaggacttccccattgccaagggagagcgccagtcccctgttgatatcgacactcatacagccaagtatgacccttccctgaagcccctgtctgtttcctatgatcaagcaacttccctgaggatcctcaacaatgatcatgctttcaacgtggagtttgatgactctcaggacaaagcagtactcaagggaggacccctggatggcacttacagattgattcagtttcactttcactggggttcacttgatggacaaggttcagagcatactgtggataaaaagaaatatgctgcagaacttcacttggttcaccggaacaccaaatatggggattttgggaaagctgtgcagcaacctgatggactggccgttctaggtatttttttgaaggttggcagcgctaaaccgggccttcagaaagttgttgatgtgctggattccattaaaacaaagggcaagagtgctgacttcactaacttcgatcctcgtggcctccttcctgaatccctggattactggacctacccaggctcactgaccacccctcctcttctggaatgtgtgacctggattgtgctcaaggaacccatcagcgtcagcagcaagcaggtgttgaaattccgtaaacttaacttcaatggggagggtgaacccgaagaactgatggtggacaactggcgcccagctcagccactgaagaacaggcaaatcaaagcttccttcaaa

SEQ ID NO: 210714 - protein, 259 aa, Artificial Sequence
  Description of Artificial Sequence: Synthetic Destabilizing Domain (DD)
SHHWGYGKHDGPEHWHKDFPIAKGERQSPVDIDTHTAKYDPSLKPLSVSYDQATSLRILNNGHAFNVKFDDSQDKAVLKGGPLDDTYRLIQFHFHWGSLDGQGSEHTMDKKIYAAELHLVHWNIKYGDFGKAVQQPGGLAVLGIFLKVGSAKPSLQKVVDVLDSIKTKGKSADFTNFDPRGLLPESLDYWTYPGSLTTPPLLECVTWIVLKEPISVSSEQVLKFRKLNFNGEGEPEELMVDNWRPAQPLKNRQIKASFK

SEQ ID NO: 210715 - DNA, 777 bp, Artificial Sequence
  Description of Artificial Sequence: Synthetic Destabilizing Domain (DD)
tcccatcactgggggtacggcaaacacgacggacctgagcactggcataaggacttccccattgccaagggagaacgccagtcccctgttgacatcgacactcatacagccaagtatgacccttccctgaagcccctgtctgtttcctatgatcaagcaacttccctgaggatcctcaacaatggtcatgctttcaacgtgaagtttgatgactctcaggacaaagcagtgctcaagggaggacccctggatgacacttacagattgattcagtttcactttcactggggttcacttgatggacaaggttcagagcatactatggataaaaagatatatgctgcagaacttcacttggttcactggaacatcaaatatggggattttgggaaagctgtgcagcaacctggtggactggccgttctaggtatttttttgaaggttggcagcgctaaaccgagccttcagaaagttgttgatgtgctggattccattaaaacaaagggcaagagtgctgacttcactaacttcgatcctcgtggcctccttcctgaatccctggattactggacctacccaggctcactgaccacccctcctcttctggaatgtgtgacctggattgtgctcaaggaacccatcagcgtcagcagcgagcaggtgttgaaattccgtaaacttaacttcaatggggagggtgaacccgaagaactgatggtggacaactggcgcccagctcagccactgaagaacaggcaaatcaaagcttccttcaaa

SEQ ID NO: 210716 - protein, 259 aa, Artificial Sequence
  Description of Artificial Sequence: Synthetic Destabilizing Domain (DD)
SHHWGYGKHNGPEHWHKDFPIAKGERQSPVDIDTHTAKYDPSLKPLSVSYDQATSLRNLNNGHAFNVEFDDSQDKAVLKGGPLDGTYRLIQFHFHWGSLDRQGSEHTVDKKKYAAELHLVHWNTKYGDFGKAVQQPDGLAVLGIFLKVGSAKPGLQKVVDVLDSIKTKGKSTDFTNFDPRGLLPESLDYWTYPGSLTTPPLLECVTWIVLKEPISVSSEQVLKFRKLNFNGEGEPEELMVDNWRPAQPLKNRQIKASFK

SEQ ID NO: 210717 - DNA, 777 bp, Artificial Sequence
  Description of Artificial Sequence: Synthetic Destabilizing Domain (DD)
tcccatcactgggggtacggcaaacacaacggacctgagcactggcataaggacttccccattgccaagggagagcgccagtcccctgttgacatcgacactcatacagccaagtatgacccatccctgaagcccctgtctgtttcctacgatcaagcaacttccctgaggaacctcaacaatggtcatgctttcaacgtggagtttgatgactctcaggacaaagcagtgctcaagggaggacccctggatggcacttacagattgattcagtttcactttcactggggttcacttgatagacaaggttcagagcatactgtggataaaaagaaatatgctgcagaacttcacttggttcactggaacaccaaatatggggattttgggaaagctgtgcagcaacctgatggactggccgttctaggtatttttttgaaggttggcagcgctaaaccgggccttcagaaagttgttgatgtgctggattccattaaaacaaagggcaagagtactgacttcactaacttcgatcctcgtggcctccttcctgaatccctggattactggacctacccaggctcactgaccacccctcctcttctggaatgtgtgacctggattgtgctcaaggaacccatcagcgtcagcagcgagcaggtgttgaaattccgtaaacttaacttcaatggggagggtgaacccgaagaactgatggtggacaactggcgcccagctcagccactgaagaacaggcaaatcaaagcttccttcaaa

SEQ ID NO: 210718 - protein, 259 aa, Artificial Sequence
  Description of Artificial Sequence: Synthetic Destabilizing Domain (DD)
SHHWGYGKHNGPEHWHKDFPIAKGERQSPVDIDTHTAKYDPSLKPLSVSYDQATSLRILNNGHAFNVEFDDSQDKAVFKGGPLDGTYRLIQFHFHWGSLDGQGSEHTVDKKKYAAELHLVHWNTKYGDFGKAVQQPDGLAVLGIFLKVGSAKPGLQKVVDVLDSIKTKGKSADFTNFDSRGLLPESLDYWTYPGSLTTPPLLECVTWIVLKEPISVSSEQVLKFRKLNFNGEGEPEELMVDNWRPAQPLKNRQIKASFK

SEQ ID NO: 210719 - DNA, 777 bp, Artificial Sequence
  Description of Artificial Sequence: Synthetic Destabilizing Domain (DD)
tcccatcactgggggtacggcaaacacaacggacctgagcactggcataaggatttccccattgccaagggagagcgccagtcccctgttgacatcgacactcatacagccaagtatgacccttccctgaagcccctgtctgtttcctatgatcaagcaacttccctgaggatcctcaacaatggtcatgctttcaacgtggagtttgatgactctcaggacaaagcagtgttcaagggaggacccctggatggcacttacagattgattcagtttcactttcactggggttcacttgatggacaaggttcagagcatactgtggataaaaagaaatatgctgcagaacttcacttggttcactggaacaccaaatatggggattttgggaaagctgtgcagcaacctgatggactggccgttctaggtatttttttgaaggttggcagcgctaaaccgggccttcagaaagttgttgatgtgctggattccattaaaacaaagggcaagagtgctgacttcactaacttcgattctcgtggcctccttcctgaatccctggattactggacctacccaggctcactgaccacccctcctcttctggaatgtgtgacctggattgtgctcaaggaacccatcagcgtcagcagcgagcaggtgttgaaattccgtaaacttaacttcaatggggagggtgaacccgaagaactgatggtggacaactggcgcccagctcagccactgaagaacaggcaaatcaaagcttccttcaaa

SEQ ID NO: 210720 - protein, 259 aa, Artificial Sequence
  Description of Artificial Sequence: Synthetic Destabilizing Domain (DD)
SHHWGYGKHNGPEHWHKDFPIAKGERQSPVDIDTHTAKYDPSLKPLSVSYDQATSLRILNNGHAFNVEFDDFQDKAVLKGGPLDGTYRLIQFHFHWGSLDGQGSEHTVDKKKYAAELHLVHWNTKYGDFGKAVQQPDGLAVLGIFLKVGSAKPGLQKVVDVLDSIKTKGKSADFTNFDPRGLLPESLDYWTYPGSLTTPPLLECVTWIVLKEPISVSSEQVLKFRKLNFNGEGEPEELMVDNWRPAQPLKNRQIKASFK

SEQ ID NO: 210721 - DNA, 777 bp, Artificial Sequence
  Description of Artificial Sequence: Synthetic Destabilizing Domain (DD)
tcccatcactgggggtacggcaaacacaacggacctgagcactggcataaggacttccccattgccaagggagagcgccagtcccctgttgacatcgacactcatacagccaagtatgacccttccctgaagcccctgtctgtttcctatgatcaagcaacttccctgaggatcctcaacaatggtcatgctttcaacgtggagtttgatgactttcaggacaaagcagtgctcaagggaggacccctggatggcacttacagattgattcagtttcactttcactggggttcacttgatggacaaggttcagagcatactgtggataaaaagaaatatgctgcagaacttcacttggttcactggaacaccaaatatggggattttgggaaagctgtgcagcaacctgatggactggccgttctaggtatttttttgaaggttggcagcgctaaaccgggccttcagaaagttgttgatgtgctggattccattaaaacaaagggcaagagtgctgacttcactaacttcgatcctcgtggcctccttcctgaatccctggattactggacctacccaggctcactgaccacccctcctcttctggaatgtgtgacctggattgtgctcaaggaacccatcagcgtcagcagcgagcaggtgttgaaattccgtaaacttaacttcaatggggagggtgaacccgaagaactgatggtggacaactggcgcccagctcagccactgaagaacaggcaaatcaaagcttccttcaaa

SEQ ID NO: 210722 - protein, 259 aa, Artificial Sequence
  Description of Artificial Sequence: Synthetic Destabilizing Domain (DD)
SHHWGYGKHNRPEHWHKDFPIAKGERQSPVDIDTHTAKYDPSLKPLSVSYDQATSLRILNNGHAFNVEFDDSQDKAVLKGGPLDGTYRLIQFHFHWGSLDGQGSEHTVDKKKYAAELHLVHWNTKYGDFGKAVQQPDGLAVLGIFLKVGSAKPGLQKVVDVLDSIKTKGKSADFTNFDPRGLLPESLDYWTYPGSLTTPPLLECVTWIVLKEPISVSSEQVLKFRKLNFNGEGEPEELMVDNWRPAQPLKNRQIKASFK

SEQ ID NO: 210723 - DNA, 777 bp, Artificial Sequence
  Description of Artificial Sequence: Synthetic Destabilizing Domain (DD)
tcccatcactgggggtacggcaaacacaacagacctgagcactggcataaggacttccccattgccaagggagagcgccagtcccctgttgacatcgacactcatacagccaagtatgacccttccctgaagcccctgtctgtttcctatgatcaagcaacttccctgaggatcctcaacaatggtcatgctttcaacgtggagtttgatgactctcaggacaaagcagtgctcaagggaggacccctggatggcacttacagattgattcagtttcactttcactggggttcacttgatggacaaggttcagagcatactgtggataaaaagaaatatgctgcagaacttcacttggttcactggaacaccaaatatggggattttgggaaagctgtgcagcaacctgatggactggccgttctaggtatttttttgaaggttggcagcgctaaaccgggccttcagaaagttgttgatgtgctggattccattaaaacaaagggcaagagtgctgacttcactaacttcgatcctcgtggcctccttcctgaatccctggattactggacctacccaggctcactgaccacccctcctcttctggaatgtgtgacctggattgtgctcaaggaacccatcagcgtcagcagcgagcaggtgttgaaattccgtaaacttaacttcaatggggagggtgaacccgaagaactgatggtggacaactggcgcccagctcagccactgaagaacaggcaaatcaaagcttccttcaaa

SEQ ID NO: 210724 - protein, 259 aa, Artificial Sequence
  Description of Artificial Sequence: Synthetic Destabilizing Domain (DD)
SHHWGYGKHNGPEHWHKDFPIAKGERQSPVDIDTHTAKYDPSLKPLSVSYDQATSLRILNNGHAFNVEFDDSQDKPVLKGGPLDGTYRLIQFHFHWGSLDRQGSEHTVDKKKYAAELHLVHWNTKYGDFGKAVQQPNGLAVLGIFLKVGSAKPGLQKVVDVLDSIKTKGKSADFTNFDPRGLLPESLDYWTYPGSLTTPPLLECVTWIVLKEPISVSSEQVLKFRKLNFNGEGEPEELMVDNWRPAQPLKNRQIKASFK

SEQ ID NO: 210725 - DNA, 777 bp, Artificial Sequence
  Description of Artificial Sequence: Synthetic Destabilizing Domain (DD)
tcccatcactgggggtacggcaaacacaacggacctgagcactggcataaggacttccccattgccaagggagagcgccagtcccctgttgacatcgacactcatacagccaagtatgacccttccctgaagcccctttctgtttcctatgatcaagcaacttccctgaggatcctcaacaatggtcatgctttcaacgtggagtttgatgactctcaggacaaaccagtgctcaagggaggacccctggatggcacttacagattgattcagtttcactttcactggggttcacttgatcgacaaggttcagagcatactgtggataaaaagaaatatgctgcagaacttcacttggttcactggaacaccaaatatggggattttgggaaagctgtgcagcaacctaatggactggccgttctaggtatttttttgaaggttggcagcgctaaaccgggccttcagaaagttgttgatgtgctggattccattaaaacaaagggcaagagtgctgacttcactaacttcgatcctcgtgggctccttcctgaatccctggattactggacctacccaggctcactgaccacccctcctcttctggaatgtgtgacctggattgtgctcaaggaacccatcagcgtcagcagcgagcaggtgttgaaattccgtaaacttaacttcaatggggagggtgaacccgaagaactgatggtggacaactggcgcccagctcagccactgaagaacaggcaaatcaaagcttccttcaaa

SEQ ID NO: 210726 - protein, 259 aa, Artificial Sequence
  Description of Artificial Sequence: Synthetic Destabilizing Domain (DD)
SHHWGYGKHNGPEHWHKDLPIAKGERQSPVDIDTHTAKYDPSLNPLSVSYDQATSLRILNNDHAFNVVFDDSQDKAVLKGGPLDGTYRLIQFHFHWGSLDGQGSEHTVDKKKYAAELHLVHWNTKYGDFGKAVQQPDGLAVLGIFLKVGSAKPGLQKVVDVLDSIKTKGKSADFTNFDPRGLLPESLDYWTYPGSLTTPPLLECVTWIVLKEPISVSSEQVLKFRKLNFIGEGEPEELMVDNWRPAQPLKNRQIKASFK

SEQ ID NO: 210727 - DNA, 777 bp, Artificial Sequence
  Description of Artificial Sequence: Synthetic Destabilizing Domain (DD)
tcccatcactgggggtacggcaaacacaacggacctgagcactggcataaggacctccccattgccaagggagagcgccagtcccctgttgacatcgacactcatacagccaagtatgacccttccctgaatcccctgtctgtttcctatgatcaagcaacttccctgaggatcctcaacaatgatcatgctttcaacgtggtgtttgatgactctcaggacaaagcagtgctcaagggaggacccctggatggcacttacagattgattcagtttcactttcactggggttcacttgatggacaaggttcagagcatactgtggataaaaagaaatatgctgcagaacttcacttggttcactggaacaccaaatatggggattttgggaaagctgtacagcaacctgatggactggccgttctaggtatttttttgaaggttggcagcgctaaaccgggccttcagaaagttgttgatgtgctggattccattaaaacaaagggcaagagtgctgacttcactaacttcgatcctcgtggcctccttcctgaatccctggattactggacctacccaggctcactgaccacccctcctcttctggaatgtgtgacctggattgtgctcaaggaacccatcagcgtcagcagcgagcaggtgttgaaattccgtaaacttaacttcattggggagggtgaacccgaagaactgatggtggacaactggcgcccagctcagccactgaagaacaggcaaatcaaagcttccttcaaa

SEQ ID NO: 210728 - protein, 259 aa, Artificial Sequence
  Description of Artificial Sequence: Synthetic Destabilizing Domain (DD)
SHHWGYGKHNGPEHWHKDFPIAKGERQSPVDIDTHTAKYDPSLKPLSVSYDQATSLRILNNGHAFNVEFDDSQDKAVLKGGPLDGTYRLIQFHFHWGSLDGQGSEHTVDKKKYAAELHLVHWNTKYGDFGKAVQQPDGLAVLGIFLKVGSAKPGLQKVVDVLDSIKTKGKSADFTNFDPRGLLPESLDYWTYPGSLTNPPPLECVTWIVLKEPISVSSEQVLKFRKFNFNGEGEPEELMVDNWRPAQPLKNRQIKASFK

SEQ ID NO: 210729 - DNA, 777 bp, Artificial Sequence
  Description of Artificial Sequence: Synthetic Destabilizing Domain (DD)
tcccatcactgggggtacggaaaacacaacggacctgagcactggcataaggacttccccattgccaagggagagcgccagtcccctgttgacatcgacactcatacagccaagtatgacccttccctgaagcccctgtctgtttcctatgatcaagcaacttccctgaggatcctcaacaatggtcatgctttcaacgtggagtttgatgactctcaggacaaagcagtgctcaagggaggacccctggatggcacttacagattgattcagtttcactttcactggggttcacttgatggacaaggttcagagcatactgtggataaaaagaaatatgctgcagaacttcacttggttcactggaacaccaaatatggggattttgggaaagctgtgcagcaacctgatggactggccgttctaggtatttttttgaaggttggcagcgctaaaccgggccttcagaaagttgttgatgtgctggattccattaaaacaaagggcaagagtgctgacttcactaacttcgatcctcgtggcctccttcctgaatccctggattactggacctacccaggctcactgaccaaccctcctcctctggaatgtgtgacctggattgtgctcaaggaacccatcagcgtcagcagcgagcaggtgttgaaattccgtaaatttaacttcaatggggagggtgaacccgaagaactgatggtggacaactggcgcccagctcagccactgaagaacaggcaaatcaaagcttccttcaaa

SEQ ID NO: 210730 - protein, 259 aa, Artificial Sequence
  Description of Artificial Sequence: Synthetic Destabilizing Domain (DD)
SHHWGYGNHNGPEHWHKDFPIAKGERQSPVDIDTHTAKYDPSLKPLSVSYDQATSLRILNNGHAFNVEFDDSQDKAVLKGGPLDGTYRLIQFHFHWGSLDGQGSEHTVDKKKYAAELHLVYWNTKYGDFGKAVQQPDGLAVLGIFLKVGSAKPGLQKVVDVLDSIKKKGKSADFTNFDPRGLLPESLDYWTYPGSLTTPPLLECVTWIVLKEPISVSSEQVLKFRKLNFNGEGEPEELMVDNWRPAQPLKNRQIKASFK

SEQ ID NO: 210731 - DNA, 777 bp, Artificial Sequence
  Description of Artificial Sequence: Synthetic Destabilizing Domain (DD)
tcccatcactgggggtacggcaatcacaacggacctgagcactggcataaggacttccccattgccaagggagagcgccagtcccctgttgacatcgacactcatacagccaagtatgacccttccctgaagcccctgtctgtttcctatgatcaagcaacttccctgaggatcctcaacaatggtcatgctttcaacgtggagtttgatgactctcaggacaaagcagtgctcaagggaggacccctggatggcacttacagattgattcagtttcactttcactggggttcacttgatggacaaggttcagagcatactgtggataaaaagaaatatgctgcagaacttcacttggtttactggaacaccaaatatggggattttgggaaagctgtgcagcaacctgatggactggccgttctaggtatttttttgaaggttggcagcgctaaaccgggccttcagaaagttgttgatgtgctggattccattaaaaaaaagggcaagagtgctgacttcacgaacttcgatcctcgtggcctccttcctgaatccctggattactggacctacccaggctcactgaccacccctcctcttctggaatgtgtgacctggattgtgctcaaggaacccatcagcgtcagcagcgagcaggtgttgaaattccgtaaacttaacttcaatggggagggtgaacccgaagaactgatggtggacaactggcgcccagctcagccactgaagaacaggcaaatcaaagcttccttcaaa

SEQ ID NO: 210732 - protein, 259 aa, Artificial Sequence
  Description of Artificial Sequence: Synthetic Destabilizing Domain (DD)
SHHWGYGKHNGPEHWHKDFPIAKGERQSPVDIDTHTAKYDPSLKPLSVSYDHATSLRILNNGHAFNVEFDDSQDKAVLKGGPLDGTYRVIHFHFHWGSLDGQGSEHTVDKKKYAAELHLVHWNTKYGDFEKAVQQPDGLAVLGIFLKVGSAKPGLQKVVDVLDSIKTKGKSADFTNFDPRGLLPESLDYWTYPGSLTTPPLLECVTWIVLKEPISVSSEQVLKFRKLNFNGEGEPEELMVDNWRPAQPLKNRQIKASFK

SEQ ID NO: 210733 - DNA, 777 bp, Artificial Sequence
  Description of Artificial Sequence: Synthetic Destabilizing Domain (DD)
tcccatcactgggggtacggcaaacacaacggacctgagcactggcataaggacttccccattgccaagggagagcgccagtcccctgttgacatcgacactcatacagccaagtatgacccttccctgaagcccctgtctgtttcctatgatcatgcaacttccctgaggatcctcaacaatggtcatgctttcaacgtggagtttgatgactctcaggacaaagcagtgctcaagggaggacccctggatggcacttacagagtgattcactttcactttcactggggttcacttgatggacaaggttcagagcatactgtggataaaaagaaatatgctgcagaacttcacttggttcactggaacaccaaatatggggattttgagaaagctgtgcagcaacctgatggactggccgttctaggtatttttttgaaggttggcagcgctaaaccgggccttcagaaagttgttgatgtgctggattccattaaaacaaagggcaagagtgctgacttcactaacttcgatcctcgtggcctccttcctgaatccctggattactggacctacccaggctcactgaccacccctcctcttctggaatgtgtgacctggattgtgctcaaggaacccatcagcgtcagcagcgagcaggtgttgaaattccgtaaacttaacttcaatggggagggtgaacccgaagaactgatggtggacaactggcgcccagctcagccactgaagaacaggcaaatcaaagcttccttcaaa

SEQ ID NO: 210734 - protein, 259 aa, Artificial Sequence
  Description of Artificial Sequence: Synthetic Destabilizing Domain (DD)
SHHWGYGKHNGPEHWHKDFPIAKGERQSPVDIDTHTAKYDPSMKPVSVSYDQATSLRILNKGHAFNVDFDDSQDKAVLKGGPLDGTYRLIQFHFHWGSLDGQGSEHTVDKKKYAAELHLVHWNTKYGDFGKAVQQPDGLAVLGIFLKVGSAKPGLQKVVDVLDSIKTKGKSADFTNFDPRGLLPESLDYWTYPGSLTTPPLLECVTWIVLKEPISVSSEQVLKFRKLNFNGEGEPEELMVDNWRPAQPLKNRQIKASFK

SEQ ID NO: 210735 - DNA, 777 bp, Artificial Sequence
  Description of Artificial Sequence: Synthetic Destabilizing Domain (DD)
tcccatcactgggggtacggcaaacacaacggacctgagcactggcataaggacttccccattgccaagggagagcgccagtcccctgttgacatcgatactcatacagccaagtatgacccttccatgaagcccgtgtctgtttcctatgatcaagcaacttccctgaggatcctcaacaaaggtcatgctttcaacgtggattttgatgactctcaggacaaagcagtgctcaagggaggacccctggatggcacttacagattgattcagtttcactttcactggggttcacttgatggacaaggttcagagcatactgtggataaaaagaaatatgctgcagaacttcacttggttcactggaacaccaaatatggggattttgggaaagctgtgcagcaacctgatggactggccgttttaggtatttttttgaaggttggcagcgctaaaccgggccttcagaaagttgttgatgtgctggattccattaaaacaaagggcaagagtgctgacttcactaacttcgatcctcgtggcctccttcctgaatccctggattactggacctacccaggctcactgaccacccctcctcttctggaatgtgtgacctggattgtgctcaaggaacccatcagcgtcagcagcgagcaggtgttgaaattccgtaaacttaacttcaatggggagggtgaacccgaagaactgatggtggacaactggcgcccagctcagccactgaagaacaggcaaatcaaagcttccttcaaa

SEQ ID NO: 210736 - protein, 259 aa, Artificial Sequence
  Description of Artificial Sequence: Synthetic Destabilizing Domain (DD)
SHHWGYGKHNGPEHWHKDLPIAKGERQSPVDIDTHTAKYDPSLNPLSVSYDQATSLRILNNGHAFNVEFDDSQDKAVLKGGPLDGTYRLIQFHFHWGSLDGQRSEHTVDKKKYAVELHLVHWNTKYGDFGKAVQQPDGLAVLGIFLKVGSAKPGLQKVVDVLDSIKTKGKSADFTNFDPRGLLPESLDYWTYPGSLTTPPLLECVTWIVLKEPISVSSEQVLKFRKLNFNGEGEPEELMVDNWRPAQPLKNRQIKASFK

SEQ ID NO: 210737 - DNA, 777 bp, Artificial Sequence
  Description of Artificial Sequence: Synthetic Destabilizing Domain (DD)
tcccatcactgggggtacggcaaacacaacggacctgagcactggcataaggacctccccattgccaagggagagcgccagtcccctgttgacatcgacactcatacagccaagtatgacccttccctgaatcccctgtctgtttcctatgatcaagcaacttccctgaggatcctcaacaatggtcatgctttcaacgtggagtttgatgactctcaggacaaagcagtgctcaagggaggacccctggatggcacttacagattgattcagtttcactttcactggggttcacttgatggacaacgttcagagcatactgtggataaaaagaaatatgctgtagaacttcacttggttcactggaacaccaaatatggggattttgggaaagctgtgcagcaacctgatggactggccgttctaggtatttttttgaaggttggcagcgctaaaccgggccttcagaaagttgttgatgtgctggattccattaaaacaaagggcaagagtgctgacttcactaacttcgatcctcgtggcctccttcctgaatccctggattactggacctacccaggctcactgaccacccctcctcttctggaatgtgtgacctggattgtgctcaaggaacccatcagcgtcagcagcgagcaggtattgaaattccgtaaacttaacttcaatggggagggtgaacccgaagaactgatggtggacaactggcgcccagctcagccactgaagaacaggcaaatcaaagcttccttcaaa

SEQ ID NO: 210738 - protein, 259 aa, Artificial Sequence
  Description of Artificial Sequence: Synthetic Destabilizing Domain (DD)
SHHWGYGKHNGPEHWHKDFPIAKGERQSPVDIDTHTAKYDPSLKPLSVSYDQATSLRILNNGHAFNVEFDDSQVKAVLKGGPLDGTYRLIQFHFHWGSLDGQGSEHTVDKKKYAAELHLVHWNTKYGDFGKAVQQPDGLAVLGIFLKVGSAKPGLQKVVDVLDSIKTNGKSADFTNFDPRGLLPESLDYWTYPGSLTTPPLLECVTWIVLKEPISVSSEQVLKFRKLNFNGEGEPEELMVDNWRPAQPLKNRQIKASLK

SEQ ID NO: 210739 - DNA, 777 bp, Artificial Sequence
  Description of Artificial Sequence: Synthetic Destabilizing Domain (DD)
tcccatcactgggggtacggcaaacacaacggacctgagcactggcataaggacttccccattgccaagggagagcgccagtcccctgttgacatcgacactcatacagccaagtatgacccttccctgaagcccctgtctgtttcctatgatcaagcaacttccctgaggatcctcaacaatggtcatgctttcaacgtggagtttgatgactctcaggtcaaagcagtgctcaagggaggacccttggatggcacttacagattgattcagtttcactttcactggggttcacttgatggacaaggttcagagcatactgtggataaaaagaaatatgctgcagaacttcacttggttcactggaacaccaaatatggggattttgggaaagctgtgcagcaacctgatggactggccgttctaggtatttttttgaaggttggcagcgctaaaccgggccttcagaaagttgttgatgtgctggattccattaaaacaaatggcaagagtgctgacttcactaacttcgatcctcgtggcctccttcctgaatccttggattactggacctacccaggctcactgaccacccctcctcttctggaatgtgtgacctggattgtgctcaaggaacccatcagcgtcagcagcgagcaggtgttgaaattccgtaaacttaacttcaatggggagggtgaacccgaagaactgatggtggacaactggcgcccagctcagccactgaagaacaggcaaatcaaagcttccctcaaa

SEQ ID NO: 210740 - protein, 259 aa, Artificial Sequence
  Description of Artificial Sequence: Synthetic Destabilizing Domain (DD)
SHHWGYGKHNGPEHWHKDFPIAKGERQSPVDIDTHTAKYDPSLKPLSVSYDQATSLRILNNGHAFNVEFDDSQDKAVLKGGPLDGTYRLIQFHFHWGSLDGQGSEHTVDKKKYAAELHLVHWNTKYGDFGKAVQQPDGLAVLGIFLKVGSAKPGLQKVVDVLDSIKTKGKSADFTNFDPRGLLPESLDYWTYPGSLTTPPLLECVSWIVLKEPISVSSEQALKFRKLNFDGEGEPEELMVDNWRPAQPLKNRQIKASFK

SEQ ID NO: 210741 - DNA, 777 bp, Artificial Sequence
  Description of Artificial Sequence: Synthetic Destabilizing Domain (DD)
tcccatcactgggggtacggcaaacacaacggacctgagcattggcataaggacttccccattgccaagggagagcgccagtcccctgttgacatcgacactcatacagccaagtatgacccttccctgaagcccctgtctgtttcctatgatcaagcaacttccctgaggatcctcaacaatggtcatgctttcaacgtggagtttgatgactctcaggacaaagcagtgctcaagggaggacccctggatggcacttacagattgattcagtttcactttcactggggttcacttgatggacaaggttcagagcatactgtggataaaaagaaatatgctgcagaacttcacttggttcactggaacaccaaatatggggattttgggaaagctgtgcagcaacctgatggactggccgttctaggtatttttttgaaggttggcagcgctaaaccgggccttcagaaagttgttgatgtgctggattccattaaaacaaagggcaagagtgctgacttcactaacttcgatcctcgtggcctccttcctgaatccctggattactggacctacccaggctcactgactacccctcctcttctggaatgtgtgtcctggattgtgctcaaggaacccatcagcgtcagcagcgagcaggcgttgaaattccgtaaacttaacttcgatggggagggtgaacccgaagaactgatggtggacaactggcgcccagctcagccactgaagaacaggcaaatcaaagcttccttcaaa

SEQ ID NO: 210742 - protein, 259 aa, Artificial Sequence
  Description of Artificial Sequence: Synthetic Destabilizing Domain (DD)
SHHWGYGKHNGPEHWHKDFPIAKGERQSPVDIDTHTAKYDPSLKPLSVSYDQATSLRFLNNGHAFNVEFDDSQDKAVLKGGPLDGTYRLIQFHFHWGSLDGQGSEHTVDKKKYAAELHLVHWNTKYGDFGKAVQQPDGLAVLGIFLKVGSAKPGLQKVVDVLDSIKTKGKSADFTNFDPRGLLPESLDYWTYPGSLTTPPLLECMTWIVLKEPISVSSEQVLKFRKLNFNREGEPEELMVDNWRPAQPLKNRQIKASFK

SEQ ID NO: 210743 - DNA, 777 bp, Artificial Sequence
  Description of Artificial Sequence: Synthetic Destabilizing Domain (DD)
tcccatcactgggggtacggcaaacacaacggacctgagcactggcataaggacttccccattgccaagggagagcgccagtcccctgttgacatcgacactcatacagccaagtatgacccttccctgaagcccctgtctgtttcctatgatcaagcaacttccctgaggttcctcaacaatggtcatgctttcaacgtggagtttgatgactctcaggacaaagcagtgctcaagggaggacccctggatggcacttacagattgattcagtttcactttcactggggctcacttgatggacaaggttcagagcatactgtggataaaaagaaatatgctgcagaacttcacttggttcactggaacaccaaatatggggattttgggaaagctgtgcagcaacctgatggactggccgttctaggtatttttttgaaggttggcagcgctaaaccgggccttcagaaagttgttgatgtgctggattccattaaaacaaagggcaagagtgctgacttcactaacttcgatcctcgtggcctccttcctgaatccctggattactggacctacccaggctcactgaccacccctcctcttctggaatgtatgacctggattgtgctcaaggaacccatcagcgtcagcagcgagcaggtgttgaaattccgtaaacttaacttcaatagggagggtgaacccgaagaactgatggtggacaactggcgcccagctcagccactgaagaacaggcaaatcaaagcttccttcaaa

SEQ ID NO: 210744 - protein, 259 aa, Artificial Sequence
  Description of Artificial Sequence: Synthetic Destabilizing Domain (DD)
SHHWGYGKHNGAEHWHKDFPIAKGERQSPVDIDTHTAKYDPSLKPLSVSYDQATSLRILNNGHAFNVEFDDSQDKAVLKGGPLDGTYRLIQFHFHWGSLDGQGSEHTVDKKKYAAELHLVHWNTKYGDFGKTVQQPDGLAVLGIFLKVGSAKPGLQKVVDVLDSIKTKGKSADFTNFDPRGLLPESLDYWTYPGSLTTPPLLECVTWIVLKEPISVSSEQVLKFRKLNFNGEGEPEELMVDNWRPAQPLKNRQIKASFK

SEQ ID NO: 210745 - DNA, 777 bp, Artificial Sequence
  Description of Artificial Sequence: Synthetic Destabilizing Domain (DD)
tcccatcactgggggtacggcaaacacaacggagctgagcactggcataaggacttccccattgccaagggagagcgccagtcccctgttgacatcgacactcatacagccaagtatgacccttccctgaagcccctgtctgtttcctatgatcaagcaacttccctgaggatcctcaacaatggtcatgctttcaacgtggagtttgatgactctcaggacaaagcagtgctcaagggaggacccctggatggcacttacagattgattcagtttcactttcactggggttcacttgatggacaaggttcagagcatactgtggataaaaagaaatatgctgcagaacttcacttggttcactggaacaccaaatatggggattttgggaaaactgtgcagcaacctgatggactggccgttctaggtatttttttgaaggttggcagcgctaaaccgggccttcagaaagttgttgatgtgctggattccattaaaacaaagggcaagagtgctgacttcactaacttcgatcctcgtggcctccttcctgaatccctggattactggacctacccaggctcactgaccacccctcctcttctggaatgtgtgacctggattgtgctcaaggaacccatcagcgtcagcagcgagcaggtgttgaaattccgtaaacttaacttcaatggggagggtgaacccgaagaactgatggtggacaactggcgcccagctcagccactgaagaacaggcaaatcaaagcttccttcaaa

SEQ ID NO: 210746 - protein, 259 aa, Artificial Sequence
  Description of Artificial Sequence: Synthetic Destabilizing Domain (DD)
SHHWGYGKHNGPEHWHKDFPIAKGERQSPVDIDTHTAKYDPSLKPLSVSYDQATSLRILRNGHAFNVEFDDSQDKAVLMGGPLDGTYRLIQFHFHWGSLDGQGSEHTVDKKKYAAELHLVHWNTKYGDFGKAVQQPDGLAVLGIFLKVGSAKPGLQKVVDVLDSIKTKGKSADFTNFDPRGLLPESLDYWTYPGSLTTPPLLECVTWIVLNEPISVSSEQVLKFRKLNFTGEGEPEELMVDNWRPAQPPKNRQIKASFK

SEQ ID NO: 210747 - DNA, 777 bp, Artificial Sequence
  Description of Artificial Sequence: Synthetic Destabilizing Domain (DD)
tcccatcactgggggtacggcaaacacaacggacctgagcactggcataaggacttccccattgccaagggagagcgccagtcccctgttgacatcgacactcatacagccaagtatgacccttccctgaagcccctgtctgtttcctatgatcaagcaacttccctgaggatcctcaggaatggtcatgctttcaacgtggagtttgatgactctcaggacaaagcagtgctcatgggaggacccctggatggcacttacagattgattcagtttcactttcactggggttcacttgatggacaaggttcagagcatactgtggataaaaagaaatatgctgcagaacttcacttggttcactggaacaccaaatatggggattttggaaaagctgtgcagcaacctgatggactggccgttctaggtatttttttgaaggttggcagcgctaaaccgggccttcagaaagttgttgatgtgctggattccattaaaacaaagggcaagagtgctgacttcactaacttcgatcctcgtggcctccttcctgaatccctggattactggacctacccaggctcactgaccacccctcctcttctggaatgtgtgacctggattgtgctcaatgaacccatcagcgtcagcagcgagcaggtgttgaaattccgtaaacttaacttcactggggagggtgaacccgaagaactgatggtggacaactggcgcccagctcagccaccgaagaacaggcaaatcaaagcttccttcaaa

SEQ ID NO: 210748 - protein, 259 aa, Artificial Sequence
  Description of Artificial Sequence: Synthetic Destabilizing Domain (DD)
SHHWGYGKHNGPEHWHKDFPIAKGERQSPVDIDTHTAKYDPSLKPLSVSYDQATSLRILNNDHAFNVVFDDSQDKAVLKGGPLDGTYRLIQFHFHWGSLDGQGSEHTVDKKKYAAELHLVHWNTKYGDFGKAVQQPDGLAVLGIFLKVGSAKPGLQKVVDVLDSIKTKGKSADFTNFDPRGLLPESLDYWTYPGSLTTPPLLECVTWIVLKEPISVSSEQVLKFRKLNFIGEGEPEELMVDNWRPAQPLKNRQIKASFK

SEQ ID NO: 210749 - DNA, 777 bp, Artificial Sequence
  Description of Artificial Sequence: Synthetic Destabilizing Domain (DD)
tcccatcactgggggtacggcaaacacaacggacctgagcactggcataaggacttccccattgccaagggagagcgccagtcccctgttgacatcgacactcatacagccaagtatgacccttccctgaagcccctgtctgtttcctatgatcaagcaacttccctgaggatcctcaacaatgatcatgctttcaacgtggtgtttgatgactctcaggacaaagcagtgctcaagggaggacccctggatggcacttacagattgattcagtttcactttcactggggttcacttgatggacaaggttcagagcatactgtggataaaaagaaatatgctgcagaacttcacttggttcactggaacaccaaatatggggattttgggaaagctgtacagcaacctgatggactggccgttctaggtatttttttgaaggttggcagcgctaaaccgggccttcagaaagttgttgatgtgctggattccattaaaacaaagggcaagagtgctgacttcactaacttcgatcctcgtggcctccttcctgaatccctggattactggacctacccaggctcactgaccacccctcctcttctggaatgtgtgacctggattgtgctcaaggaacccatcagcgtcagcagcgagcaggtgttgaaattccgtaaacttaacttcattggggagggtgaacccgaagaactgatggtggacaactggcgcccagctcagccactgaagaacaggcaaatcaaagcttccttcaaa

SEQ ID NO: 210750 - protein, 259 aa, Artificial Sequence
  Description of Artificial Sequence: Synthetic Destabilizing Domain (DD)
SHHWGYGKHNGPEHWHKDFPIAKGERQSPVDIDTHTAKYDPSLKPLSVSYDQATSLRNLNNGHAFNVEFDDSQDKAVLKGGPLDGTYILIQFHFHWGSLDGQGSEHTVDKKKYAAELHLVHWNTKYGDFGKAVQQPDGLAVLGIFLKVGSAKPGLQKVVDVLDSIKTKGKSADFTNFDPRGLLPESLDYWTYPGSLTTPPLLECVTWIVLKEPISVSSEQVLKFRKLNFNGEGEPEELMVDNWRPAQPLKNRQIKASFK

SEQ ID NO: 210751 - DNA, 777 bp, Artificial Sequence
  Description of Artificial Sequence: Synthetic Destabilizing Domain (DD)
tcccatcactgggggtacggcaaacacaacggacctgagcactggcataaggacttccccattgccaagggagagcgccagtcccctgttgacatcgacactcatacagccaagtatgacccttccctgaagcccctgtctgtttcctatgatcaagcaacttccctgaggaacctcaacaatggtcatgctttcaacgtggagtttgatgactctcaggacaaagcagtgctcaagggaggacccctggatggcacttacatattgattcagtttcactttcactggggttcacttgatggacaaggttcagagcatactgtggataaaaagaaatatgctgcagaacttcacttggttcactggaacaccaaatatggggattttgggaaagctgtgcagcaacctgatggactggccgttctaggtatttttttgaaggttggcagcgctaaaccgggccttcagaaagttgttgatgtgctggattccattaaaacaaagggcaagagtgctgacttcactaacttcgatcctcgtggcctccttcctgaatccctggattactggacctacccaggctcactgaccacccctcctcttctggaatgtgtgacctggattgtgctcaaggaacccatcagcgtcagcagcgagcaggtgttgaaattccgtaaacttaacttcaatggggagggtgaacccgaagaactgatggtggacaactggcgcccagctcagccactgaagaacaggcaaatcaaagcttccttcaaa

SEQ ID NO: 210752 - protein, 259 aa, Artificial Sequence
  Description of Artificial Sequence: Synthetic Destabilizing Domain (DD)
SHHWGYGKHNGPEHWHKDFPIAKGERQSPVDIDTHTAKYDPSLKPLSVSYDQATSLRILNNGHNFNVEFDDSQDKAVLKGGPLDDTYRLIQFHFHWGSLDGQGSEHTVDKKKYAAELHLVHWNTKYGDFRKAVQQPDGLAVLGIFLKVGSAKPDLQNVVDALDSIKTKDKSADFTNFDPRGLLPESLDYWTYPGSLTTPPLLECVTWIVLKEPISVSSEQVLKFRKLNFNGEGELEELMVDNWRPAQPLKNRQIKASFK

SEQ ID NO: 210753 - DNA, 777 bp, Artificial Sequence
  Description of Artificial Sequence: Synthetic Destabilizing Domain (DD)
tcccatcactgggggtacggcaaacacaacggacctgagcactggcataaggacttccccattgccaagggagagcgccagtcccctgttgacatcgacactcatacagccaagtatgacccttccctgaagcccctgtctgtttcctatgatcaagcaacttccctgaggatcctcaacaatggtcataatttcaacgtggagtttgatgactctcaggacaaagcagtgctcaagggaggacccctggatgacacttacagattgattcagtttcactttcactggggttcacttgatggacaaggttcagagcatactgtggataaaaagaaatatgctgcagaacttcacttggttcactggaacaccaaatatggggattttaggaaagctgtgcagcaacctgatggactggccgttctaggtatttttttgaaggttggcagcgctaaaccggaccttcagaatgttgttgatgcgctggattccattaaaacaaaggacaagagtgctgacttcactaacttcgatcctcgtggcctccttcctgaatccctggattactggacctacccaggctcactgaccacccctcctcttctggaatgtgtgacctggattgtgctcaaggaacccatcagcgtcagcagcgagcaggtgttgaaattccgtaaacttaacttcaatggggagggtgaactcgaagaactgatggtggacaactggcgcccagctcagccactgaagaacaggcaaatcaaagcttccttcaaa

SEQ ID NO: 210754 - protein, 259 aa, Artificial Sequence
  Description of Artificial Sequence: Synthetic Destabilizing Domain (DD)
SHHWGYGKHNRPEYWHKVFPIAKGERQSPVDIDTHTAKYDPSLKPLSVSYDQATSLRILNNGHAFNVEFDDSQDKAVLKGGPLDGTYRLIQFHFHWGSLDGQGSEHTVDKKKYAAELHLVHWNTKYGDFGKAVQQPDGLAVLGIFLKVGSAKPGLQKVVDVLDSIKTKGKSADFTNFDPRGLLPESLDYWTYPGSLTTPPLLECVTWIVLKEPISVSSEQVLKFRKLNFNGEGEPEELMVDNWRPAQPLKNRQIKASFK

SEQ ID NO: 210755 - DNA, 777 bp, Artificial Sequence
  Description of Artificial Sequence: Synthetic Destabilizing Domain (DD)
tcccatcactgggggtacggcaaacacaaccgacctgagtactggcataaggtcttccccattgccaagggagagcgccagtcccctgttgacatcgacactcatacagccaagtatgacccttccctgaagcccctgtctgtttcctatgatcaagcaacttcactgagaatcctcaacaatggtcatgctttcaacgtggagtttgatgactctcaggacaaagcagtgctcaagggaggacccctggatggcacttacagattgattcagtttcactttcactggggttcacttgatggacaaggttcagagcatactgtggataaaaagaaatatgctgcagaacttcacttggttcactggaacaccaaatatggggattttgggaaagctgtgcagcaacctgatggactggccgttctaggtatttttttgaaggttggcagcgctaaaccgggccttcagaaagttgttgatgtgctggattccattaaaacaaagggcaagagtgctgacttcactaacttcgatcctcgtggcctccttcctgaatccctggattactggacctacccaggctcactgaccacccctcctcttctggaatgtgtgacctggattgtgctcaaggaacccatcagcgtcagcagcgagcaggtgttgaaattccgtaaacttaacttcaatggggagggtgaacccgaagaactgatggtggacaactggcgcccagctcagccactgaagaacaggcaaatcaaagcttccttcaaa

SEQ ID NO: 210756 - protein, 259 aa, Artificial Sequence
  Description of Artificial Sequence: Synthetic Destabilizing Domain (DD)
SHHWGYGKHNGPEHWHKDFPIAKGERQSPVDIDTHTAKYDPSLKPLSVSYDQATSLRILNNGHAFNVEFDDSQDKAVLKGGPLDGTYRLIQFHFHWGSLDGQGSEHTVDKKKYAAELHLVHWNTKYGDFGKAVQQPDGLAVLGIFLKVGSAKPGHQKVVDVLDSIKTKGKCADFTNYDPRGLLPDSLDYWTYPGSLTTPPLLECVTWIVLKEPISVSSEQVLKFRKLNFNGEGEPEELMVDNWRPAQPLKNRQIKASFK

SEQ ID NO: 210757 - DNA, 777 bp, Artificial Sequence
  Description of Artificial Sequence: Synthetic Destabilizing Domain (DD)
tcccatcactgggggtacggcaaacacaacggacctgagcactggcataaggacttccccattgccaagggagagcgccagtcccctgttgacatcgacactcatacagccaagtatgacccttccctgaagcccctgtctgtttcctatgatcaagcaacttccctgaggatcctcaacaatggtcatgctttcaacgtggagtttgatgactctcaggacaaagcagtgctcaagggaggacccctggatggcacttacagattgattcagtttcactttcactggggttcacttgatggacaaggttcagagcatactgtggataaaaagaaatatgctgcagaacttcacttggttcactggaacaccaaatatggggattttgggaaagctgtgcagcaacctgatggactggccgttctaggtatttttttgaaggttggcagcgctaaaccgggccatcagaaagttgttgatgtgctggattccattaaaacaaagggcaagtgtgctgacttcactaactacgatcctcgtggcctccttcctgattccctggattactggacctacccaggctcactgaccacccctcctcttctggaatgtgtgacctggattgtgctcaaggaacccatcagcgtcagcagcgagcaggtgttgaaattccgtaaacttaacttcaatggggagggtgaacccgaagaactgatggtggacaactggcgcccagctcagccactgaagaacaggcaaatcaaagcttccttcaaa

SEQ ID NO: 210758 - protein, 259 aa, Artificial Sequence
  Description of Artificial Sequence: Synthetic Destabilizing Domain (DD)
SHHWGYGKHNGPEHWHKDFPIAKGERQSPVDIDTHTAKYDPSLKPLSVSYDQATSLRILNNGHVFNVEFDDSQDKAVLKGGPLDGTYRLIQFHYHWGSLDGQGSGQTVDKKKYAAELHLVHWNTKYGDFGKAVQQPDGLAVLGMFLKVGSAKPGLQKVVDVLDSIKTKGKSADITNFDPRGLLPESLDYWTYPGSLTTPPLLECVTWIVLKEPISVSSEQVLKFRKLNFNGEGEPEELMVDNWRPAQPLKNRQIKASFK

SEQ ID NO: 210759 - DNA, 777 bp, Artificial Sequence
  Description of Artificial Sequence: Synthetic Destabilizing Domain (DD)
tcccatcactgggggtacggcaaacacaacggacctgagcactggcataaggacttccccattgccaagggagagcgccagtcccctgttgacatcgacactcatacagccaagtatgacccttccctgaagcccctgtctgtttcctatgatcaagcaacttccctgaggatcctcaacaatggtcatgttttcaacgtggagtttgatgactctcaggacaaagcagtgctcaagggaggacccctggatggcacttacagattgattcagtttcactatcactggggttcacttgatggacaaggttcagggcaaactgtggataaaaagaaatatgctgcagaacttcacttggttcactggaacaccaaatatggggattttgggaaagctgtgcagcaacctgatggactggccgttctaggtatgtttttgaaggttggcagcgctaaaccgggccttcagaaagttgttgatgtgctggattccattaaaacaaagggcaagagtgctgacatcactaacttcgatcctcgtggcctccttcctgaatccctggattactggacctacccaggctcactgaccacccctcctcttctggaatgtgtgacctggattgtgctcaaggaacccatcagcgtcagcagcgagcaggtgttgaaattccgtaaacttaacttcaatggagagggtgaacccgaagaactgatggtggacaactggcgcccagctcagccactgaagaacaggcaaatcaaagcttccttcaaa

SEQ ID NO: 210760 - protein, 259 aa, Artificial Sequence
  Description of Artificial Sequence: Synthetic Destabilizing Domain (DD)
SHHWGYGKHNGPEHWHKDFPIAKGERQSPVDIDTHTAKYDPSLKPLSVSYDQATSLRILNNGHAFNVEFDDSQDKAVLKGGPLDGTYRLIQFHFHWGSLDGQGSEHTVDKKKYAAELHLVHWNTKYGDFGKAVQQPDGLAVLGIFLKVGSAKPGLQKVVDVLDSIKTKGKSADFTNFDPRGLLPESLDYWTYPGSPTTPPLLECVTWIVLKEPISVSSEQVLKFRKLNFNGEGEPEELMVDNWRPAQPLKNRQIKASFK

SEQ ID NO: 210761 - DNA, 777 bp, Artificial Sequence
  Description of Artificial Sequence: Synthetic Destabilizing Domain (DD)
tcccatcactgggggtacggcaaacacaacggacctgagcactggcataaggacttccccattgccaagggagagcgtcagtcccctgttgacatcgacactcatacagccaagtatgacccttccctgaagcccctgtctgtttcctatgatcaagcaacttccctgaggatcctcaacaatggtcatgctttcaacgtggagtttgatgactctcaggacaaagcagtgctcaagggaggacccctggatggcacttacagattgattcagtttcactttcactggggttcacttgatggacaaggttcagagcatactgtggataaaaagaaatatgctgcagaacttcacttggttcactggaacaccaaatatggggattttgggaaagctgtgcagcaacctgatggactggccgttctaggtatttttttgaaggttggcagcgctaaaccgggccttcagaaagttgttgatgtgctggattccattaaaacaaagggcaagagtgctgacttcactaacttcgatcctcgtggcctccttcctgaatccctggattactggacctacccaggctcaccgaccacccctcctcttctggaatgtgtgacctggattgtgctcaaggaacccatcagcgtcagcagcgagcaggtgttgaaattccgtaaacttaacttcaatggggagggtgaacccgaagaactgatggtggacaactggcgcccagctcagccactgaagaacaggcaaatcaaagcttccttcaaa

SEQ ID NO: 210762 - protein, 141 aa, Artificial Sequence
  Description of Artificial Sequence: Synthetic Destabilizing Domain (DD)
SHHWGYGKHNEPEHWHKDFPIAKGERQSPVDIDTHTVKYDPSLKPLSVSYDQATSLRILNNGHVFNVEFDDSQDKAVLKGGPLDGTYRLIQFHFHWVHLMDKVQSILWIKRNMLQNFTWFTGTPNMGILGELCSNLMDWPF

SEQ ID NO: 210763 - protein, 117 aa, Artificial Sequence
  Description of Artificial Sequence: Synthetic Destabilizing Domain (DD)
VFFLKVGSAKPGQQKVVDALDSIKTKGKSADFTNFDPRGLLPESLDYWTYPGSLTTPPLLECVTWIVLKEPISVSSEQVLKFRKLNFNGEGEPEELMVDNWRPAQPLKNRQIKASFK

SEQ ID NO: 210764 - DNA, 777 bp, Artificial Sequence
  Description of Artificial Sequence: Synthetic Destabilizing Domain (DD)
tcccatcactgggggtacggcaaacacaacgaacctgagcactggcataaggacttccccattgccaagggagagcgccagtcccctgttgacatcgacactcatacagtcaagtatgacccttccctgaagcccctgtctgtttcctatgatcaagcaacttccctgaggatcctcaacaatggtcatgttttcaacgtggagtttgatgactctcaggacaaagcagtgctcaagggaggacccctggatggcacttacagattgattcagtttcactttcactgggttcacttgatggacaaggttcagagcatactgtggataaaaagaaatatgctgcagaatttcacttggttcactggaacaccaaatatggggattttgggagagctgtgcagcaacctgatggactggccgttctaggtattttttttgaaggttggcagcgctaaaccgggccaacagaaagttgttgatgcgctggattccattaaaacaaagggcaagagtgctgacttcactaacttcgatcctcgtggcctccttcctgaatccctggattactggacctacccaggctcactgaccacccctcctcttctggaatgtgtgacctggattgtgctcaaggaacccatcagcgtcagcagcgagcaggtgttgaaattccgtaaacttaacttcaatggggagggtgaacccgaagaactgatggtggacaactggcgcccagctcagccactgaagaacaggcaaatcaaagcttccttcaaa

SEQ ID NO: 210765 - protein, 189 aa, Artificial Sequence
  Description of Artificial Sequence: Synthetic Destabilizing Domain (DD)
SHHWGYGKHNGPEHWHKDLPIAKGERQSPVDIDTHTAKYDPSLNPLSVSYDQATSLRILNNGHAFNVEFDDSQDKAVLKGGPLDGTYRLIQFHFHWGSLDGQRSEHTVDKKKYAVELHLVHWNTKYGDFGKAVQQPDGLAVLGIFLKVGSAKPGLQKVVDVLDSIKTKGKSGDFTNFDPRGLLPESLDY

SEQ ID NO: 210766 - protein, 69 aa, Artificial Sequence
  Description of Artificial Sequence: Synthetic Destabilizing Domain (DD)
TYPGSLTTPPLLECVTWIVLKEPISVSSEQVLKFRKLNFNGEGEPEELMVDNWRPAQPLKNRQIKASFK

SEQ ID NO: 210767 - DNA, 777 bp, Artificial Sequence
  Description of Artificial Sequence: Synthetic Destabilizing Domain (DD)
tcccatcactgggggtacggcaaacacaacggacctgagcactggcataaggacctccccattgccaagggagagcgccagtcccctgttgacatcgacactcatacagccaagtatgacccttccctgaatcccctgtctgtttcctatgatcaagcaacttccctgaggatcctcaacaatggtcatgctttcaacgtggagtttgatgactctcaggacaaagcagtgctcaagggaggacccctggatggcacttacagattgattcagtttcactttcactggggttcacttgatggacaacgttcagagcatactgtggataaaaagaaatatgctgtagaacttcacttggttcactggaacaccaaatatggggattttgggaaagctgtgcagcaacctgatggactggccgttctaggtatttttttgaaggttggcagcgctaaaccgggccttcagaaagttgttgatgtgctggattccattaaaacaaagggcaagagtggtgacttcactaacttcgatcctcgtggcctccttcctgaatccctggattactgaacctacccaggctcactgaccacccctcctcttctggaatgtgtgacctggattgtgctcaaggaacccatcagcgtcagcagcgagcaggtgttgaaattccgtaaacttaacttcaatggggagggtgaacccgaagaactgatggtggacaactggcgcccagctcagccactgaagaacaggcaaatcaaagcttccttcaaa

SEQ ID NO: 210768 - protein, 189 aa, Artificial Sequence
  Description of Artificial Sequence: Synthetic Destabilizing Domain (DD)
SHHWGYGKHNGPEHWDKDFPIAKGERQSSVDIDTHTAKYDPSLKPLSVSYDQATSLRILNNGHAFNVEFDDSQDKAVLKVGPLDGTYRLIQFHFHWGSLDGQGSEHTVDKKKYAAELHLVHWNTKYGDFGRAVQQPDGLAVLGIFLKVGIDKPGLQKVVDVLDSIKTKGKSGDFTNFDPRGLLPESLDY

SEQ ID NO: 210769 - DNA, 777 bp, Artificial Sequence
  Description of Artificial Sequence: Synthetic Destabilizing Domain (DD)
tcccatcactgggggtacggcaaacacaacggacctgagcattgggataaggacttccccattgccaagggagagcgccagtcctctgttgacatcgacactcatacagccaagtatgacccttccctgaagcccctgtctgtttcctatgatcaagcaacttccctgaggatcctcaacaatggtcatgctttcaacgtggagtttgatgactctcaggacaaagcagtgctcaaggtaggacccctggatggcacttacagattgattcagtttcactttcactggggttcacttgatggacaaggttcagagcatactgtggataaaaagaaatatgctgcagaacttcacttggttcactggaacaccaaatatggggattttgggagagctgtgcagcaacctgatggactggccgttctaggtatttttttgaaggttggcatcgataaaccgggccttcagaaagttgttgatgtgctggattccattaaaacaaagggcaagagtggtgacttcactaacttcgatcctcgtggcctccttcctgaatccctggattactgaacctacccaggctcactgaccacccctcctcttctggaatgtgtgacctggattgtgctcaaggaacccatcagcgtcagcagcgagcaggtattgaaattccgtaaacttaacttcaatggggagggtgaacccgaagaactgatggtggacaactggcgcccagctcagccactgaagaacaggcaaatcaaagcttccttcaaa

SEQ ID NO: 210770 - DNA, 777 bp, Artificial Sequence
  Description of Artificial Sequence: Synthetic Destabilizing Domain (DD)
tcccatcactgggggtacggcaaacacaacggacctgagcattgggataaggacttccccattgccaagggagagcgccagtcctctgttgacatcgacactcatacagccaagtatgacccttccctgaagcccctgtctgtttcctatgatcaagcaacttccctgaggatcctcaacaatggtcatgctttcaacgtggagtttgatgactctcaggacaaagcagtgctcaaggtaggacccctggatggcacttacagattgattcagtttcactttcactggggttcacttgatggacaaggttcagagcatactgtggataaaaagaaatatgctgcagaacttcacttggttcactggaacaccaaatatggggattttgggagagctgtgcagcaacctgatggactggccgttctaggtatttttttgaaggttggcatcgataaaccgggccttcagaaagttgttgatgtgctggattccattaaaacaaagggcaagagtggtgacttcactaacttcgatcctcgtggcctccttcctgaatccctggattactgaacctacccaggctcactgaccacccctcctcttctggaatgtgtgacctggattgtgctcaaggaacccatcagcgtcagcagcgagcaggtgttgaaattccgtaaacttaacttcaatggggagggtgaacccgaagaactgatggtggacaactggcgcccagctcagccactgaagaacaggcaaatcaaagcttccttcaaa

SEQ ID NO: 210771 - protein, 88 aa, Artificial Sequence
  Description of Artificial Sequence: Synthetic Destabilizing Domain (DD)
SHHWGYGKHNGPEHWHKDFPIAKGERQSPVDIDTHTAKYDPSLKPLSVSYDQATSLRNLNNGHAFNVEFDDSQDKAVLKGGPLDGTYR

SEQ ID NO: 210772 - protein, 170 aa, Artificial Sequence
  Description of Artificial Sequence: Synthetic Destabilizing Domain (DD)
IQFHFHWGSLDRQGSEHTVDKKKYAAELHLVHWNTKYGDFGKAVQQPDGLAVLGIFLKVGSAKPGLQKVVDVLDSIKTKGKSADFTNFDPRGLLPESLDYWTYPGSLTTPPLLECVTWIVLKEPISVSSEQVLKFRKLNFNGEGEPEELMVDNWRPAQPLKNRQIKASFK

SEQ ID NO: 210773 - DNA, 777 bp, Artificial Sequence
  Description of Artificial Sequence: Synthetic Destabilizing Domain (DD)
tcccatcactgggggtacggcaaacacaacggacctgagcactggcataaggacttccccattgccaagggagagcgccagtcccctgttgacatcgacactcatacagccaagtatgacccatccctgaagcccctgtctgtttcctacgatcaagcaacttccctgaggaacctcaacaatggtcatgctttcaacgtggagtttgatgactctcaggacaaagcagtgctcaagggaggacccctggatggcacttacagatagattcagtttcactttcactggggttcacttgatagacaaggttcagagcatactgtggataaaaagaaatatgctgcagaacttcacttggttcactggaacaccaaatatggggattttgggaaagctgtgcagcaacctgatggactggccgttctaggtatttttttgaaggttggcagcgctaaaccgggccttcagaaagttgttgatgtgctggattccattaaaacaaagggcaagagtgctgacttcactaacttcgatcctcgtggcctccttcctgaatccctggattactggacctacccaggctcactgaccacccctcctcttctggaatgtgtgacctggattgtgctcaaggaacccatcagcgtcagcagcgagcaggtgttgaaattccgtaaacttaacttcaatggggagggtgaacccgaagaactgatggtggacaactggcgcccagctcagccactgaagaacaggcaaatcaaagcttccttcaaa

SEQ ID NO: 210774 - protein, 242 aa, Artificial Sequence
  Description of Artificial Sequence: Synthetic Destabilizing Domain (DD)
SHHWGYGKHNGPEHWHKDFPIAKGERQSPVDIDIHTAKYDPSLKPLSVSYDQATSLRILNNGHAFNVEFDDSQDKAVLKGGPLDGTYRLIQFHFHWGSLDGQGSEHTVDKKKHAAELHLVHWNTKYGDFGKAVQQPDGLAVLGIFLKVGSAKLGLQKVVVVLDSIKTKGKSADFTNFDPRGLLPESLDYWTYPGSLTTAPLLECVTWIVLKEPISVSSERVLKLRKLNFNGDGEPEELMVDN

SEQ ID NO: 210775 - protein, 16 aa, Artificial Sequence
  Description of Artificial Sequence: Synthetic Destabilizing Domain (DD)
RPAQPLKNRQIKASFK

SEQ ID NO: 210776 - DNA, 777 bp, Artificial Sequence
  Description of Artificial Sequence: Synthetic Destabilizing Domain (DD)
tcccatcactgggggtacggcaaacacaacggacctgagcactggcataaggacttccccattgccaagggagagcgccagtcccctgttgacatcgacattcatacagccaagtatgacccttccctgaagcccctgtctgtttcctatgatcaagcaacttccctgaggatcctcaacaatggtcatgctttcaacgtggagtttgatgactctcaggataaagcagtgctcaagggaggacccctggatggcacttacagattgattcagtttcactttcactggggttcacttgatggacaaggttcagagcatactgtggataaaaagaaacatgctgcagaacttcacttggttcactggaacaccaaatatggggattttgggaaagctgtgcagcaacctgatggactggccgttctaggtatttttttgaaggttggcagcgctaaactgggccttcagaaagttgttgttgtgctggattccattaaaacaaagggcaagagtgctgacttcactaacttcgatcctcgtggcctccttcctgaatccctggattactggacctacccaggctcactgaccaccgctcctcttctggaatgtgtgacctggattgtgctcaaggaacccatcagcgtcagcagcgagcgggtgttgaaattacgtaaacttaacttcaatggggacggtgaacccgaagaactgatggtggacaactgacgcccagctcagccactgaagaacaggcaaatcaaagcttccttcaaa

SEQ ID NO: 210777 - protein, 188 aa, Artificial Sequence
  Description of Artificial Sequence: Synthetic Destabilizing Domain (DD)
SHHWGYGKHNGPEHWHKDFPIAKGERQSPVDIDTHTAKYDPSLKPLSVSYDQATSLRILNNGHAFNVEFDDSQDKAVLKGGPLDGTYRLIQFHFHWGSLDGQGLEHTVDKKKYAAELHLVHWNTKYGDFGKAVQQPDGVAVLGIFLKVGSAKPCLQKVVDVLDSIKTKGKSADFTNFDPRGLLPESLD

SEQ ID NO: 210778 - protein, 70 aa, Artificial Sequence
  Description of Artificial Sequence: Synthetic Destabilizing Domain (DD)
WTYPGSLTTPPLLECVTWIVLKEPISVSSEQVLKFRKLNFNGEGEPEELMVDNWRPAQPLKNRQIKASFK

SEQ ID NO: 210779 - DNA, 777 bp, Artificial Sequence
  Description of Artificial Sequence: Synthetic Destabilizing Domain (DD)
tcccatcactgggggtacggcaaacacaacggacctgagcactggcataaggacttccccattgccaagggagagcgccagtcccctgttgacatcgacactcatacagccaagtatgacccttccctgaagcccctgtctgtttcctatgatcaagcaacttccctgaggatcctcaacaatggtcatgctttcaacgtggagtttgatgactctcaggacaaagcagtgctcaagggaggacccctagatggcacttacagattgattcagtttcactttcactggggttcacttgatggacaaggtttagagcatactgtggataaaaagaaatatgctgcagaacttcacttggttcactggaacaccaaatatggggattttgggaaagctgtgcagcaacctgatggagtggccgttctaggtatttttttgaaggttggcagcgctaaaccgtgccttcagaaagttgttgatgtgctggattccattaaaacaaagggcaagagtgctgacttcactaacttcgatcctcgtggcctccttcctgaatccctggattagtggacctacccaggctcactgaccacccctcctcttctggaatgtgtgacctggattgtgctcaaggaacccatcagcgtcagcagcgagcaggtgttgaaattccgtaaacttaacttcaatggggagggtgaacccgaagaactgatggtggacaactggcgcccagctcagccactgaagaacaggcaaatcaaagcttccttcaaa

SEQ ID NO: 210780 - protein, 242 aa, Artificial Sequence
  Description of Artificial Sequence: Synthetic Destabilizing Domain (DD)
SHHWGYGKHNGPEHWHKDFPIAKGERQSPVDIDIHTAKYDPSLKPLSVSYDQATSLRILNNGHAFNVEFDDSQDKAVLKGGPLDGTYRLIQFHFHWGSLDGQGSEHTVDKKKHAAELHLVHWNTKYGDFGKAVQQPDGLAVLGIFLKVGSAKLGLQKVVVVLDSIKTKGKSADFTNFDPRGLLPESLDYWTYPGSLTTAPLLECVTWIVLKEPISVSSEQVLKLRKLNFNGDGEPEELMVDN

SEQ ID NO: 210781 - DNA, 777 bp, Artificial Sequence
  Description of Artificial Sequence: Synthetic Destabilizing Domain (DD)
tcccatcactgggggtacggcaaacacaacggacctgagcactggcataaggacttccccattgccaagggagagcgccagtcccctgttgacatcgacattcatacagccaagtatgacccttccctgaagcccctgtctgtttcctatgatcaagcaacttccctgaggatcctcaacaatggtcatgctttcaacgtggagtttgatgactctcaggataaagcagtgctcaagggaggacccctggatggcacttacagattgattcagtttcactttcactggggttcacttgatggacaaggttcagagcatactgtggataaaaagaaacatgctgcagaacttcacttggttcactggaacaccaaatatggggattttgggaaagctgtgcagcaacctgatggactggccgttctaggtatttttttgaaggttggcagcgctaaactgggccttcagaaagttgttgttgtgctggattccattaaaacaaagggcaagagtgctgacttcactaacttcgatcctcgtggcctccttcctgaatccctggattactggacctacccaggctcactgaccaccgctcctcttctggaatgtgtgacctggattgtgctcaaggaacccatcagcgtcagcagcgagcaggtgttgaaattacgtaaacttaacttcaatggggacggtgaacccgaagaactgatggtggacaactgacgcccagctcagccactgaagaacaggcaaatcaaagcttccttcaaa

SEQ ID NO: 210782 - protein, 165 aa, Artificial Sequence
  Description of Artificial Sequence: Synthetic Destabilizing Domain (DD)
SHHWGYGKHNGPEHWHKDFPIAKGERQSPVDIDTHTAKYDPSLKPLSVSYDQATSLRILNNGHAFNVEFDDSQDKAVLKGGPLDGTYRLIQFHFHWGSLDGQGSEHTVDKKKYAAELHLVHWNTKYGDFGKAVQQPDGLAVLGIFLKVGSAKPGLQKVVDVLDSI

SEQ ID NO: 210783 - protein, 45 aa, Artificial Sequence
  Description of Artificial Sequence: Synthetic Destabilizing Domain (DD)
TKGKSADFTNFDPHGLLPESLDYWTYPGSLTTPPLLECVTWIVLK

SEQ ID NO: 210784 - protein, 47 aa, Artificial Sequence
  Description of Artificial Sequence: Synthetic Destabilizing Domain (DD)
PISLSSEQVLKFRKHNFNGEGEPEELMVDNWRPAQPLKNRQIKASFK

SEQ ID NO: 210785 - DNA, 777 bp, Artificial Sequence
  Description of Artificial Sequence: Synthetic Destabilizing Domain (DD)
tcccatcactgggggtacggcaaacacaacggacctgagcactggcataaggacttccccattgccaagggagagcgccagtcccctgttgacatcgacactcatacagccaagtatgacccttccctgaagcccctgtctgtttcctatgatcaagcaacttccctgaggatcctcaacaatggtcatgctttcaacgtggaatttgatgactctcaggacaaagcagtgctcaagggaggacccctggatggcacttacagattgattcagtttcactttcactggggttcacttgatggacaaggttcagagcatactgtggataaaaagaaatatgctgcagaacttcacttggttcactggaacaccaaatatggggattttgggaaagctgtgcagcaacctgatggactggccgttctaggtatttttttgaaggttggcagcgctaaaccgggccttcagaaagttgttgatgtgctggattccatttaaacaaagggcaagagtgctgacttcactaacttcgatcctcatggcctccttcctgaatccctggattactggacctacccaggctcactgaccacccctcctcttctggaatgtgtgacctggattgtgctcaagtaacccatcagcctcagcagcgagcaggtgttgaaattccgtaagcataacttcaatggggagggtgaacccgaagaactgatggtggacaactggcgcccagctcagccactgaagaacaggcaaatcaaagcttccttcaaa

SEQ ID NO: 210786 - protein, 29 aa, Artificial Sequence
  Description of Artificial Sequence: Synthetic Destabilizing Domain (DD)
TKGKSADFTNFDPHGLLPESLDYWTYQAH

SEQ ID NO: 210787 - protein, 8 aa, Artificial Sequence
  Description of Artificial Sequence: Synthetic Destabilizing Domain (DD)
PPLLFWNV

SEQ ID NO: 210788 - protein, 16 aa, Artificial Sequence
  Description of Artificial Sequence: Synthetic Destabilizing Domain (DD)
PGLCSRNPSASAASRC

SEQ ID NO: 210789 - protein, 15 aa, Artificial Sequence
  Description of Artificial Sequence: Synthetic Destabilizing Domain (DD)
NSVNLTSMGRLNPKN

SEQ ID NO: 210790 - protein, 10 aa, Artificial Sequence
  Description of Artificial Sequence: Synthetic Destabilizing Domain (DD)
WWTTGAQLSH

SEQ ID NO: 210791 - protein, 9 aa, Artificial Sequence
  Description of Artificial Sequence: Synthetic Destabilizing Domain (DD)
RTGKSKLPS

SEQ ID NO: 210792 - DNA, 776 bp, Artificial Sequence
  Description of Artificial Sequence: Synthetic Destabilizing Domain (DD)
tcccatcactgggggtacggcaaacacaacggacctgagcactggcataaggacttccccattgccaagggagagcgccagtcccctgttgacatcgacactcatacagccaagtatgacccttccctgaagcccctgtctgtttcctatgatcaagcaacttccctgaggatcctcaacaatggtcatgctttcaacgtggaatttgatgactctcaggacaaagcagtgctcaagggaggacccctggatggcacttacagattgattcagtttcactttcactggggttcacttgatggacaaggttcagagcatactgtggataaaaagaaatatgctgcagaacttcacttggttcactggaacaccaaatatggggattttgggaaagctgtgcagcaacctgatggactggccgttctaggtatttttttgaaggttggcagcgctaaaccgggccttcagaaagttgttgatgtgctggattccatttaaacaaagggcaagagtgctgacttcactaacttcgatcctcatggcctccttcctgaatccctggattactggacctaccaggcccactgaccacccctcctcttctggaatgtgtgacctggattgtgctcaaggaacccatcagcgtcagcagcgagcaggtgttgaaattccgtaaacttaacttcaatggggaggctgaacccgaagaactgatggtggacaactggcgcccagctcagccactgaagaacaggcaaatcaaagcttccttcaaa

SEQ ID NO: 210793 - protein, 115 aa, Artificial Sequence
  Description of Artificial Sequence: Synthetic Destabilizing Domain (DD)
SHHWGYGKHNGHEHWHKDFPIAKGERQSPVDIDTHTAKYDPSLKPLSVSYDQATSLRILNNGHAFNVEFDDSQDKAVLKGGPLDGTYRLIQFHFHWGSLDGQGSEHTVDKKKYAA

SEQ ID NO: 210794 - protein, 79 aa, Artificial Sequence
  Description of Artificial Sequence: Synthetic Destabilizing Domain (DD)
LHLVHWNTKYGDFGKAVQQPDGLAVLGIFLKVSSAKPGLQKVVDVLDSIKTKGKSADFTNFDPRGLFLNPWITGPTQAH

SEQ ID NO: 210795 - protein, 4 aa, Artificial Sequence
  Description of Artificial Sequence: Synthetic Destabilizing Domain (DD)
PGLC

SEQ ID NO: 210796 - protein, 11 aa, Artificial Sequence
  Description of Artificial Sequence: Synthetic Destabilizing Domain (DD)
RNPSASAASRC

SEQ ID NO: 210797 - protein, 15 aa, Artificial Sequence
  Description of Artificial Sequence: Synthetic Destabilizing Domain (DD)
NSVNLTSMGRVNPKN

SEQ ID NO: 210798 - DNA, 776 bp, Artificial Sequence
  Description of Artificial Sequence: Synthetic Destabilizing Domain (DD)
tcccatcactgggggtacggcaaacacaacggacatgagcactggcataaggacttccccattgccaagggagagcgccagtcccctgttgacatcgacactcatacagccaagtatgacccttccctgaagcccctgtctgtttcctatgatcaagcaacttccctgaggatcctcaacaatggtcatgctttcaacgtggagtttgatgactctcaggacaaagcagtgctcaagggaggacccctggatggcacttacagattgattcagtttcactttcactggggttcacttgatggacaaggttcagagcatactgtggataaaaagaaatatgctgcataacttcacttggttcactggaacaccaaatatggggattttgggaaagctgtgcagcaacctgatggactggccgttctaggtatttttttgaaggttagcagcgctaaaccgggccttcagaaagttgttgatgtgctggattccattaaaacaaagggcaagagtgctgacttcactaacttcgatcctcgtggcctcttcctgaatccctggattactggacctacccaggctcactgaccacccctcctcttctggaatgtgtgacctggattgtgctgaaggaacccatcagcgtcagcagcgagcaggtgttgaaattccgtaaacttaacttcaatggggagggtgaacccgaagaactgatggtggacaactggcgcccagctcagccactgaagaacaggcaaatcaaagcttccttcaaa

SEQ ID NO: 210799 - protein, 151 aa, Artificial Sequence
  Description of Artificial Sequence: Synthetic Destabilizing Domain (DD)
SHHWGYGKHNGPEHWHKDFPIAKGERQSPVDIDTHTAKYDPSLKPLSVSYDQATSLRILNNGHAFNVEFDDSQDKAVLKGGPLDGTYRLIQFHFHWGSLDGQGSEHTVDKKKYAAELHLVHWNTKYGDFGKTVQQPDGLAVLGIFFEGWQR

SEQ ID NO: 210800 - protein, 7 aa, Artificial Sequence
  Description of Artificial Sequence: Synthetic Destabilizing Domain (DD)
TGPSESC

SEQ ID NO: 210801 - protein, 5 aa, Artificial Sequence
  Description of Artificial Sequence: Synthetic Destabilizing Domain (DD)
CAGFH

SEQ ID NO: 210802 - protein, 6 aa, Artificial Sequence
  Description of Artificial Sequence: Synthetic Destabilizing Domain (DD)
NKGQEC

SEQ ID NO: 210803 - protein, 8 aa, Artificial Sequence
  Description of Artificial Sequence: Synthetic Destabilizing Domain (DD)
LRSSWPPS

SEQ ID NO: 210804 - protein, 40 aa, Artificial Sequence
  Description of Artificial Sequence: Synthetic Destabilizing Domain (DD)
IPGLLDLPRLTDHPSSSGMCDLDCAQGTHQRQQRAGVEIP

SEQ ID NO: 210805 - protein, 5 aa, Artificial Sequence
  Description of Artificial Sequence: Synthetic Destabilizing Domain (DD)
LQWGG

SEQ ID NO: 210806 - protein, 25 aa, Artificial Sequence
  Description of Artificial Sequence: Synthetic Destabilizing Domain (DD)
TRRTDGGQLAPSSATEEQANQSFLQ

SEQ ID NO: 210807 - DNA, 778 bp, Artificial Sequence
  Description of Artificial Sequence: Synthetic Destabilizing Domain (DD)
tcccatcactgggggtacggcaaacacaacggacctgagcactggcataaggacttccccattgccaagggagagcgccagtcccctgttgacatcgacactcatacagccaagtatgacccttccctgaagcccctgtctgtttcctatgatcaagcaacttccctgaggatcctcaacaatggtcatgctttcaacgtggagtttgatgactctcaggacaaagcagtgctcaagggaggacccctggatggcacttacagattgattcagtttcactttcactggggttcacttgatggacaaggttcagagcatactgtggataaaaagaaatatgctgcagaacttcacttggttcactggaacaccaaatatggggattttgggaaaactgtgcagcaacctgatggactggccgttctaggtattttttttgaaggttggcagcgctaaaccgggccttcagaaagttgttgatgtgctggattccattaaaacaaagggcaagagtgctgacttcactaacttcgatcctcgtggcctccttcctgaatccctggattactggacttacccaggctcactgaccacccctcctcttctggaatgtgtgacctggattgtgctcaaggaacccatcagcgtcagcagcgagcaggtgttgaaattccgtaaacttaacttcaatggggagggtgaacccgaagaactgatggtggacaactggcgcccagctcagccactgaagaacaggcaaatcaaagcttccttcaaa

SEQ ID NO: 210808 - protein, 151 aa, Artificial Sequence
  Description of Artificial Sequence: Synthetic Destabilizing Domain (DD)
SHHWGYGKHNGPEHWHKDLPIAKGERQSPVDIDTHTAKYDPSLNPLSVSYDQATSLRILNNGHAFNVEFDDSQDKAVLKGGPLDGTYRLIQFHFHWGSLDGQRSEHTVDKKKYAVELHLVHWNTKYGDFGKAVQQPDGLAVLGIFFEGWQR

SEQ ID NO: 210809 - protein, 40 aa, Artificial Sequence
  Description of Artificial Sequence: Synthetic Destabilizing Domain (DD)
IPGLLDLPRLTDHPSSSGMCDLDCAQGTHQRQQRAGIEIP

SEQ ID NO: 210810 - DNA, 778 bp, Artificial Sequence
  Description of Artificial Sequence: Synthetic Destabilizing Domain (DD)
tcccatcactgggggtacggcaaacacaacggacctgagcactggcataaggacctccccattgccaagggagagcgccagtcccctgttgacatcgacactcatacagccaagtatgacccttccctgaatcccctgtctgtttcctatgatcaagcaacttccctgaggatcctcaacaatggtcatgctttcaacgtggagtttgatgactctcaggacaaagcagtgctcaagggaggacccctggatggcacttacagattgattcagtttcactttcactggggttcacttgatggacaacgttcagagcatactgtggataaaaagaaatatgctgtagaacttcacttggttcactggaacaccaaatatggggattttgggaaagctgtgcagcaacctgatggactggccgttctaggtattttttttgaaggttggcagcgctaaaccgggccttcagaaagttgttgatgtgctggattccattaaaacaaagggcaagagtgctgacttcactaacttcgatcctcgtggcctccttcctgaatccctggattactggacctacccaggctcactgaccacccctcctcttctggaatgtgtgacctggattgtgctcaaggaacccatcagcgtcagcagcgagcaggtattgaaattccgtaaacttaacttcaatggggagggtgaacccgaagaactgatggtggacaactggcgcccagctcagccactgaagaacaggcaaatcaaagcttccttcaaa

SEQ ID NO: 210811 - protein, 42 aa, Artificial Sequence
  Description of Artificial Sequence: Synthetic Destabilizing Domain (DD)
SHHWGYGKHKDLNTGIRTSPLPRESASPLLTSTLIQPSMTLP

SEQ ID NO: 210812 - protein, 12 aa, Artificial Sequence
  Description of Artificial Sequence: Synthetic Destabilizing Domain (DD)
SPCLFPMIKQLP

SEQ ID NO: 210813 - protein, 32 aa, Artificial Sequence
  Description of Artificial Sequence: Synthetic Destabilizing Domain (DD)
GSSTMVMLSTWSLMTLRTKQCSREDPWMALTD

SEQ ID NO: 210814 - protein, 52 aa, Artificial Sequence
  Description of Artificial Sequence: Synthetic Destabilizing Domain (DD)
FSFTFTGVHLMDKVQSILWIKRNMLQNFTWFTGTPNMGILGKLCSNLMDWPF

SEQ ID NO: 210815 - protein, 49 aa, Artificial Sequence
  Description of Artificial Sequence: Synthetic Destabilizing Domain (DD)
RLAALNRAFRKLLMCWIPLKQRARVLTSLTSILVASFVNPWITGPTQAH

SEQ ID NO: 210816 - protein, 16 aa, Artificial Sequence
  Description of Artificial Sequence: Synthetic Destabilizing Domain (DD)
PGLCSWNPSASAASRC

SEQ ID NO: 210817 - protein, 15 aa, Artificial Sequence
  Description of Artificial Sequence: Synthetic Destabilizing Domain (DD)
NYVNLTSMGRVNPKN

SEQ ID NO: 210818 - protein, 10 aa, Artificial Sequence
  Description of Artificial Sequence: Synthetic Destabilizing Domain (DD)
RWTTGALLSH

SEQ ID NO: 210819 - DNA, 776 bp, Artificial Sequence
  Description of Artificial Sequence: Synthetic Destabilizing Domain (DD)
tcccatcactgggggtacggcaaacacaaggacctgaacactggcataaggacttccccattgccaagggagagcgccagtcccctgttgacatcgacactcatacagccaagtatgacccttccctgaagcccctgtctgtttcctatgatcaagcaacttccctgaggatcctcaacaatggtcatgctttcaacgtggagtttgatgactctcaggacaaagcagtgctcaagggaggacccctggatggcacttacagattgattcagtttcactttcactggggttcacttgatggacaaggttcagagcatactgtggataaaaagaaatatgctgcagaacttcacttggttcactggaacaccaaatatggggattttgggaaagctgtgcagcaacctgatggactggccgttctaggtatttttttgaaggttggcagcgctaaaccgggccttcagaaagttgttgatgtgctggattccattaaaacaaagggcaagagtgctgacttcactaacttcgatcctcgtggcctccttcgtgaatccctggattactggacctacccaggctcactgaccacccctcctcttctggaatgtgtgacctggattgtgctcatggaacccatcagcgtcagcagcgagcaggtgttgaaattacgtaaacttaacttcaatggggagggtgaacccgaagaactgaaggtggacaactggcgccctgctcagccactgaagaacaggcaaatcaaagcttccttcaaa

SEQ ID NO: 210820 - protein, 142 aa, Artificial Sequence
  Description of Artificial Sequence: Synthetic Destabilizing Domain Template  sequence
MSHHWGYGKHNGPEHWHKDFPIAKGERQSPVDIDTHTAKYDPSLKPLSVSYDQATSLRILNNGHAFNVEFDDSQDKAVLKGGPLDGTYRLIQFHFHWGSLDGQGSEHTVDKKKYAAELHLVHWNTKYGDFGKAVQQPDGLAV

SEQ ID NO: 210821 - protein, 141 aa, Artificial Sequence
  Description of Artificial Sequence: Synthetic Destabilizing Domain Template  sequence
SHHWGYGKHNGPEHWHKDFPIAKGERQSPVDIDTHTAKYDPSLKPLSVSYDQATSLRILNNGHAFNVEFDDSQDKAVLKGGPLDGTYRLIQFHFHWGSLDGQGSEHTVDKKKYAAELHLVHWNTKYGDFGKAVQQPDGLAV

SEQ ID NO: 210822 - protein, 190 aa, Artificial Sequence
  Description of Artificial Sequence: Synthetic Destabilizing Domain Template  sequence
MSHHWGYGKHNGPEHWHKDFPIAKGERQSPVDIDTHTAKYDPSLKPLSVSYDQATSLRILNNGHAFNVEFDDSQDKAVLKGGPLDGTYRLIQFHFHWGSLDGQGSEHTVDKKKYAAELHLVHWNTKYGDFGKAVQQPDGLAVLGIFLKVGSAKPGLQKVVDVLDSIKTKGKSADFTNFDPRGLLPESLDY

SEQ ID NO: 210823 - protein, 189 aa, Artificial Sequence
  Description of Artificial Sequence: Synthetic Destabilizing Domain Template  sequence
SHHWGYGKHNGPEHWHKDFPIAKGERQSPVDIDTHTAKYDPSLKPLSVSYDQATSLRILNNGHAFNVEFDDSQDKAVLKGGPLDGTYRLIQFHFHWGSLDGQGSEHTVDKKKYAAELHLVHWNTKYGDFGKAVQQPDGLAVLGIFLKVGSAKPGLQKVVDVLDSIKTKGKSADFTNFDPRGLLPESLDY

SEQ ID NO: 210824 - protein, 89 aa, Artificial Sequence
  Description of Artificial Sequence: Synthetic Destabilizing Domain Template  sequence
MSHHWGYGKHNGPEHWHKDFPIAKGERQSPVDIDTHTAKYDPSLKPLSVSYDQATSLRILNNGHAFNVEFDDSQDKAVLKGGPLDGTYR

SEQ ID NO: 210825 - protein, 88 aa, Artificial Sequence
  Description of Artificial Sequence: Synthetic Destabilizing Domain Template  sequence
SHHWGYGKHNGPEHWHKDFPIAKGERQSPVDIDTHTAKYDPSLKPLSVSYDQATSLRILNNGHAFNVEFDDSQDKAVLKGGPLDGTYR

SEQ ID NO: 210826 - protein, 243 aa, Artificial Sequence
  Description of Artificial Sequence: Synthetic Destabilizing Domain Template  sequence
MSHHWGYGKHNGPEHWHKDFPIAKGERQSPVDIDTHTAKYDPSLKPLSVSYDQATSLRILNNGHAFNVEFDDSQDKAVLKGGPLDGTYRLIQFHFHWGSLDGQGSEHTVDKKKYAAELHLVHWNTKYGDFGKAVQQPDGLAVLGIFLKVGSAKPGLQKVVDVLDSIKTKGKSADFTNFDPRGLLPESLDYWTYPGSLTTPPLLECVTWIVLKEPISVSSEQVLKFRKLNFNGEGEPEELMVDN

SEQ ID NO: 210827 - protein, 242 aa, Artificial Sequence
  Description of Artificial Sequence: Synthetic Destabilizing Domain Template  sequence
SHHWGYGKHNGPEHWHKDFPIAKGERQSPVDIDTHTAKYDPSLKPLSVSYDQATSLRILNNGHAFNVEFDDSQDKAVLKGGPLDGTYRLIQFHFHWGSLDGQGSEHTVDKKKYAAELHLVHWNTKYGDFGKAVQQPDGLAVLGIFLKVGSAKPGLQKVVDVLDSIKTKGKSADFTNFDPRGLLPESLDYWTYPGSLTTPPLLECVTWIVLKEPISVSSEQVLKFRKLNFNGEGEPEELMVDN

SEQ ID NO: 210828 - protein, 166 aa, Artificial Sequence
  Description of Artificial Sequence: Synthetic Destabilizing Domain Template  sequence
MSHHWGYGKHNGPEHWHKDFPIAKGERQSPVDIDTHTAKYDPSLKPLSVSYDQATSLRILNNGHAFNVEFDDSQDKAVLKGGPLDGTYRLIQFHFHWGSLDGQGSEHTVDKKKYAAELHLVHWNTKYGDFGKAVQQPDGLAVLGIFLKVGSAKPGLQKVVDVLDSI

SEQ ID NO: 210829 - DNA, 495 bp, Artificial Sequence
  Description of Artificial Sequence: Synthetic Destabilizing Domain Template  sequence
tcccatcactgggggtacggcaaacacaacggacctgagcactggcataaggacttccccattgccaagggagagcgccagtcccctgttgacatcgacactcatacagccaagtatgacccttccctgaagcccctgtctgtttcctatgatcaagcaacttccctgaggatcctcaacaatggtcatgctttcaacgtggaatttgatgactctcaggacaaagcagtgctcaagggaggacccctggatggcacttacagattgattcagtttcactttcactggggttcacttgatggacaaggttcagagcatactgtggataaaaagaaatatgctgcagaacttcacttggttcactggaacaccaaatatggggattttgggaaagctgtgcagcaacctgatggactggccgttctaggtatttttttgaaggttggcagcgctaaaccgggccttcagaaagttgttgatgtgctggattccatt

SEQ ID NO: 210830 - protein, 116 aa, Artificial Sequence
  Description of Artificial Sequence: Synthetic Destabilizing Domain Template  sequence
MSHHWGYGKHNGPEHWHKDFPIAKGERQSPVDIDTHTAKYDPSLKPLSVSYDQATSLRILNNGHAFNVEFDDSQDKAVLKGGPLDGTYRLIQFHFHWGSLDGQGSEHTVDKKKYAA

SEQ ID NO: 210831 - protein, 115 aa, Artificial Sequence
  Description of Artificial Sequence: Synthetic Destabilizing Domain Template  sequence
SHHWGYGKHNGPEHWHKDFPIAKGERQSPVDIDTHTAKYDPSLKPLSVSYDQATSLRILNNGHAFNVEFDDSQDKAVLKGGPLDGTYRLIQFHFHWGSLDGQGSEHTVDKKKYAA

SEQ ID NO: 210832 - protein, 152 aa, Artificial Sequence
  Description of Artificial Sequence: Synthetic Destabilizing Domain Template  sequence
MSHHWGYGKHNGPEHWHKDFPIAKGERQSPVDIDTHTAKYDPSLKPLSVSYDQATSLRILNNGHAFNVEFDDSQDKAVLKGGPLDGTYRLIQFHFHWGSLDGQGSEHTVDKKKYAAELHLVHWNTKYGDFGKAVQQPDGLAVLGIFLKVGSA

SEQ ID NO: 210833 - protein, 151 aa, Artificial Sequence
  Description of Artificial Sequence: Synthetic Destabilizing Domain Template  sequence
SHHWGYGKHNGPEHWHKDFPIAKGERQSPVDIDTHTAKYDPSLKPLSVSYDQATSLRILNNGHAFNVEFDDSQDKAVLKGGPLDGTYRLIQFHFHWGSLDGQGSEHTVDKKKYAAELHLVHWNTKYGDFGKAVQQPDGLAVLGIFLKVGSA

SEQ ID NO: 210834 - protein, 43 aa, Artificial Sequence
  Description of Artificial Sequence: Synthetic Destabilizing Domain Template  sequence
MSHHWGYGKHNGPEHWHKDFPIAKGERQSPVDIDTHTAKYDPS

SEQ ID NO: 210835 - protein, 42 aa, Artificial Sequence
  Description of Artificial Sequence: Synthetic Destabilizing Domain Template  sequence
SHHWGYGKHNGPEHWHKDFPIAKGERQSPVDIDTHTAKYDPS

SEQ ID NO: 210836 - DNA, 423 bp, Artificial Sequence
  Description of Artificial Sequence: Synthetic Destabilizing Domain (DD)
tcccatcactgggggtacggcaaacacaacgaacctgagcactggcataaggacttccccattgccaagggagagcgccagtcccctgttgacatcgacactcatacagtcaagtatgacccttccctgaagcccctgtctgtttcctatgatcaagcaacttccctgaggatcctcaacaatggtcatgttttcaacgtggagtttgatgactctcaggacaaagcagtgctcaagggaggacccctggatggcacttacagattgattcagtttcactttcactgggttcacttgatggacaaggttcagagcatactgtggataaaaagaaatatgctgcagaatttcacttggttcactggaacaccaaatatggggattttgggagagctgtgcagcaacctgatggactggccgttc

SEQ ID NO: 210837 - DNA, 567 bp, Artificial Sequence
  Description of Artificial Sequence: Synthetic Destabilizing Domain (DD)
tcccatcactgggggtacggcaaacacaacggacctgagcactggcataaggacctccccattgccaagggagagcgccagtcccctgttgacatcgacactcatacagccaagtatgacccttccctgaatcccctgtctgtttcctatgatcaagcaacttccctgaggatcctcaacaatggtcatgctttcaacgtggagtttgatgactctcaggacaaagcagtgctcaagggaggacccctggatggcacttacagattgattcagtttcactttcactggggttcacttgatggacaacgttcagagcatactgtggataaaaagaaatatgctgtagaacttcacttggttcactggaacaccaaatatggggattttgggaaagctgtgcagcaacctgatggactggccgttctaggtatttttttgaaggttggcagcgctaaaccgggccttcagaaagttgttgatgtgctggattccattaaaacaaagggcaagagtggtgacttcactaacttcgatcctcgtggcctccttcctgaatccctggattac

SEQ ID NO: 210838 - DNA, 567 bp, Artificial Sequence
  Description of Artificial Sequence: Synthetic Destabilizing Domain (DD)
tcccatcactgggggtacggcaaacacaacggacctgagcattgggataaggacttccccattgccaagggagagcgccagtcctctgttgacatcgacactcatacagccaagtatgacccttccctgaagcccctgtctgtttcctatgatcaagcaacttccctgaggatcctcaacaatggtcatgctttcaacgtggagtttgatgactctcaggacaaagcagtgctcaaggtaggacccctggatggcacttacagattgattcagtttcactttcactggggttcacttgatggacaaggttcagagcatactgtggataaaaagaaatatgctgcagaacttcacttggttcactggaacaccaaatatggggattttgggagagctgtgcagcaacctgatggactggccgttctaggtatttttttgaaggttggcatcgataaaccgggccttcagaaagttgttgatgtgctggattccattaaaacaaagggcaagagtggtgacttcactaacttcgatcctcgtggcctccttcctgaatccctggattac

SEQ ID NO: 210839 - DNA, 264 bp, Artificial Sequence
  Description of Artificial Sequence: Synthetic Destabilizing Domain (DD)
tcccatcactgggggtacggcaaacacaacggacctgagcactggcataaggacttccccattgccaagggagagcgccagtcccctgttgacatcgacactcatacagccaagtatgacccatccctgaagcccctgtctgtttcctacgatcaagcaacttccctgaggaacctcaacaatggtcatgctttcaacgtggagtttgatgactctcaggacaaagcagtgctcaagggaggacccctggatggcacttacaga

SEQ ID NO: 210840 - DNA, 726 bp, Artificial Sequence
  Description of Artificial Sequence: Synthetic Destabilizing Domain (DD)
tcccatcactgggggtacggcaaacacaacggacctgagcactggcataaggacttccccattgccaagggagagcgccagtcccctgttgacatcgacattcatacagccaagtatgacccttccctgaagcccctgtctgtttcctatgatcaagcaacttccctgaggatcctcaacaatggtcatgctttcaacgtggagtttgatgactctcaggataaagcagtgctcaagggaggacccctggatggcacttacagattgattcagtttcactttcactggggttcacttgatggacaaggttcagagcatactgtggataaaaagaaacatgctgcagaacttcacttggttcactggaacaccaaatatggggattttgggaaagctgtgcagcaacctgatggactggccgttctaggtatttttttgaaggttggcagcgctaaactgggccttcagaaagttgttgttgtgctggattccattaaaacaaagggcaagagtgctgacttcactaacttcgatcctcgtggcctccttcctgaatccctggattactggacctacccaggctcactgaccaccgctcctcttctggaatgtgtgacctggattgtgctcaaggaacccatcagcgtcagcagcgagcgggtgttgaaattacgtaaacttaacttcaatggggacggtgaacccgaagaactgatggtggacaac

SEQ ID NO: 210841 - DNA, 564 bp, Artificial Sequence
  Description of Artificial Sequence: Synthetic Destabilizing Domain (DD)
tcccatcactgggggtacggcaaacacaacggacctgagcactggcataaggacttccccattgccaagggagagcgccagtcccctgttgacatcgacactcatacagccaagtatgacccttccctgaagcccctgtctgtttcctatgatcaagcaacttccctgaggatcctcaacaatggtcatgctttcaacgtggagtttgatgactctcaggacaaagcagtgctcaagggaggacccctagatggcacttacagattgattcagtttcactttcactggggttcacttgatggacaaggtttagagcatactgtggataaaaagaaatatgctgcagaacttcacttggttcactggaacaccaaatatggggattttgggaaagctgtgcagcaacctgatggagtggccgttctaggtatttttttgaaggttggcagcgctaaaccgtgccttcagaaagttgttgatgtgctggattccattaaaacaaagggcaagagtgctgacttcactaacttcgatcctcgtggcctccttcctgaatccctggat

SEQ ID NO: 210842 - DNA, 726 bp, Artificial Sequence
  Description of Artificial Sequence: Synthetic Destabilizing Domain (DD)
tcccatcactgggggtacggcaaacacaacggacctgagcactggcataaggacttccccattgccaagggagagcgccagtcccctgttgacatcgacattcatacagccaagtatgacccttccctgaagcccctgtctgtttcctatgatcaagcaacttccctgaggatcctcaacaatggtcatgctttcaacgtggagtttgatgactctcaggataaagcagtgctcaagggaggacccctggatggcacttacagattgattcagtttcactttcactggggttcacttgatggacaaggttcagagcatactgtggataaaaagaaacatgctgcagaacttcacttggttcactggaacaccaaatatggggattttgggaaagctgtgcagcaacctgatggactggccgttctaggtatttttttgaaggttggcagcgctaaactgggccttcagaaagttgttgttgtgctggattccattaaaacaaagggcaagagtgctgacttcactaacttcgatcctcgtggcctccttcctgaatccctggattactggacctacccaggctcactgaccaccgctcctcttctggaatgtgtgacctggattgtgctcaaggaacccatcagcgtcagcagcgagcaggtgttgaaattacgtaaacttaacttcaatggggacggtgaacccgaagaactgatggtggacaac

SEQ ID NO: 210843 - DNA, 345 bp, Artificial Sequence
  Description of Artificial Sequence: Synthetic Destabilizing Domain (DD)
tcccatcactgggggtacggcaaacacaacggacatgagcactggcataaggacttccccattgccaagggagagcgccagtcccctgttgacatcgacactcatacagccaagtatgacccttccctgaagcccctgtctgtttcctatgatcaagcaacttccctgaggatcctcaacaatggtcatgctttcaacgtggagtttgatgactctcaggacaaagcagtgctcaagggaggacccctggatggcacttacagattgattcagtttcactttcactggggttcacttgatggacaaggttcagagcatactgtggataaaaagaaatatgctgca

SEQ ID NO: 210844 - DNA, 453 bp, Artificial Sequence
  Description of Artificial Sequence: Synthetic Destabilizing Domain (DD)
tcccatcactgggggtacggcaaacacaacggacctgagcactggcataaggacttccccattgccaagggagagcgccagtcccctgttgacatcgacactcatacagccaagtatgacccttccctgaagcccctgtctgtttcctatgatcaagcaacttccctgaggatcctcaacaatggtcatgctttcaacgtggagtttgatgactctcaggacaaagcagtgctcaagggaggacccctggatggcacttacagattgattcagtttcactttcactggggttcacttgatggacaaggttcagagcatactgtggataaaaagaaatatgctgcagaacttcacttggttcactggaacaccaaatatggggattttgggaaaactgtgcagcaacctgatggactggccgttctaggtattttttttgaaggttggcagcgc

SEQ ID NO: 210845 - DNA, 453 bp, Artificial Sequence
  Description of Artificial Sequence: Synthetic Destabilizing Domain (DD)
tcccatcactgggggtacggcaaacacaacggacctgagcactggcataaggacctccccattgccaagggagagcgccagtcccctgttgacatcgacactcatacagccaagtatgacccttccctgaatcccctgtctgtttcctatgatcaagcaacttccctgaggatcctcaacaatggtcatgctttcaacgtggagtttgatgactctcaggacaaagcagtgctcaagggaggacccctggatggcacttacagattgattcagtttcactttcactggggttcacttgatggacaacgttcagagcatactgtggataaaaagaaatatgctgtagaacttcacttggttcactggaacaccaaatatggggattttgggaaagctgtgcagcaacctgatggactggccgttctaggtattttttttgaaggttggcagcgc

SEQ ID NO: 210846 - DNA, 126 bp, Artificial Sequence
  Description of Artificial Sequence: Synthetic Destabilizing Domain (DD)
tcccatcactgggggtacggcaaacacaaggacctgaacactggcataaggacttccccattgccaagggagagcgccagtcccctgttgacatcgacactcatacagccaagtatgacccttccc

SEQ ID NO: 210847 - DNA, 777 bp, Artificial Sequence
  Description of Artificial Sequence: Synthetic Destabilizing Domain (DD)
tcccatcactgggggtacggcaaacacaacggacctgagcactggcataaggacttccccattgccaagggagagcgccagtcccctgttgacatcgacactcatacagccaagtatgacccttccctgaagcccctgtctgtttcctacgatcaagcaacttccctgaggaacctcaacaatggtcatgctttcaacgtggagtttgatgactctcaggacaaagcagtgctcaagggaggacccctggatggcacttacagattgattcagtttcactttcactggggttcacttgatagacaaggttcagagcatactgtggataaaaagaaatatgctgcagaacttcacttggttcactggaacaccaaatatggggattttgggaaagctgtgcagcaacctgatggactggccgttctaggtatttttttgaaggttggcagcgctaaaccgggccttcagaaagttgttgatgtgctggattccattaaaacaaagggcaagagtgctgacttcactaacttcgatcctcgtggcctccttcctgaatccctggattactggacctacccaggctcactgaccacccctcctcttctggaatgtgtgacctggattgtgctcaaggaacccatcagcgtcagcagcgagcaggtgttgaaattccgtaaacttaacttcaatggggagggtgaacccgaagaactgatggtggacaactggcgcccagctcagccactgaagaacaggcaaatcaaagcttccttcaaa

SEQ ID NO: 210848 - DNA, 777 bp, Artificial Sequence
  Description of Artificial Sequence: Synthetic Destabilizing Domain (DD)
tcccatcactgggggtacggcaaacacaacggacctgagcactggcataaggacttccccattgccaagggagagcgccagtcccctgttgacatcgacactcatacagccaagtatgacccatccctgaagcccctgtctgtttcctacgatcaagcaacttccctgaggaacctcaacaatggtcatgctttcaacgtggagtttgatgactctcaggacaaagcagtgctcaagggaggacccctggatggcacttacagattgattcagtttcactttcactggggttcacttgatagacaaggttcagagcatactgtggataaaaagaaatatgctgcagaacttcacttggttcactggaacaccaaatatggggattttgggaaagctgtgcagcaacctgatggactggccgttctaggtatttttttgaaggttggcagcgctaaaccgggccttcagaaagttgttgatgtgctggattccattaaaacaaagggcaagagtgctgacttcactaacttcgatcctcgtggcctccttcctgaatccctggattactggacctacccaggctcactgaccacccctcctcttctggaatgtgtgacctggattgtgctcaaggaacccatcagcgtcagcagcgagcaggtgttgaaattccgtaaacttaacttcaatggagagggtgaacccgaagaactgatggtggacaactggcgcccagctcagccactgaagaacaggcaaatcaaagcttccttcaaa

SEQ ID NO: 210849 - DNA, 777 bp, Artificial Sequence
  Description of Artificial Sequence: Synthetic Destabilizing Domain (DD)
tcccatcactgggggtacggcaaacacaacggacctgagcactggcataaggacttccccattgccaagggagagcgccagtcccctgttgacatcgacactcatacagccaagtatgacccatccctgaagcccctgtctgtttcctacgatcaagcaacttccctgaggaacctcaacaatggtcatgctttcaacgtggagtttgatgactctcaggacaaagcagtgctcaagggaggacccctggatggcacttacagattgattcagtttcactttcactggggttcacttgatagacaaggttcagagcatactgtggataaaaagaaatatgctgcagaacttcacttggttcactggaacaccaaatatggggattttgggaaagctgtgcagcaacctgatggactggccgttctaggtatttttttgaaggttggcagcgctaaaccgggccttcagaaagttgttgatgtgctggattccattaaaacaaagggcaagagtgctgacttcactaacttcgatcctcgtggcctccttcctgaatccctggattactggacctacccaggctcactgaccacccctcctcttctggaatgtgtgacctggattgtgctcaaggaacccatcagcgtcagcagcgagcaggtgttgaaattccgtaaacttaacttcaatggggagggtgaacccgaagaactgatggtggacaactggcgcccagctcagccactgaagaacaggcaaatcaaagcttccttcaaa

SEQ ID NO: 210850 - DNA, 777 bp, Artificial Sequence
  Description of Artificial Sequence: Synthetic Destabilizing Domain (DD)
tcccatcactgggggtacggcaaacacaacggacctgagcactggcataaggacttccccattgccaagggagagcgccagtcccctgttgacatcgacactcatacagccaagtatgacccttccctgaagcccctgtctgtttcctatgatcaagcaacttccctgaggatcctcaacaatggtcatgctttcaacgtggagtttgatgactctcaggacaaagcagtgctcaagggaggacccctggatggcacttacagattgattcagtttcactttcactggggttcacttgatggacaaggttcagagcatactgtggataaaaagaaatatgctgcagaacttcacttggttcactggaacaccaaatatggggattttgggaaagctgtgcagcaacctgatggactggccgttctaggtatttttttgaaggttggcagcgctaaaccgggccatcagaaagttgttgatgtgctggattccattaaaacaaagggcaagagtgctgacttcactaacttcgatcctcgtggcctccttcctgaatccctggattactggacctacccaggctcactgaccacccctcctcttctggaatgtgtgacctggattgtgctcaaggaacccatcagcgtcagcagcgagcaggtgttgaaattccgtaaacttaacttcaatggggagggtgaacccgaagaactgatggtggacaactggcgcccagctcagccactgaagaacaggcaaatcaaagcttccttcaaa

SEQ ID NO: 210851 - protein, 259 aa, Artificial Sequence; identical to SEQ ID NO: 210748
  Description of Artificial Sequence: Synthetic Destabilizing Domain (DD)

SEQ ID NO: 210852 - DNA, 777 bp, Artificial Sequence; identical to SEQ ID NO: 210749
  Description of Artificial Sequence: Synthetic Destabilizing Domain (DD)

SEQ ID NO: 210853 - protein, 501 aa, Artificial Sequence
  Description of Artificial Sequence: Synthetic Construct
MVSKGAELFTGIVPILIELNGDVNGHKFSVSGEGEGDATYGKLTLKFICTTGKLPVPWPTLVTTLSYGVQCFSRYPDHMKQHDFFKSAMPEGYIQERTIFFEDDGNYKSRAEVKFEGDTLVNRIELTGTDFKEDGNILGNKMEYNYNAHNVYIMTDKAKNGIKVNFKIRHNIEDGSVQLADHYQQNTPIGDGPVLLPDNHYLSTQSALSKDPNEKRDHMIYFGFVTAAAITHGMDELYKGSGSHHWGYGKHNGPEHWHKDFPIAKGERQSPVDIDTHTAKYDPSLKPLSVSYDQATSLRILNNDHAFNVVFDDSQDKAVLKGGPLDGTYRLIQFHFHWGSLDGQGSEHTVDKKKYAAELHLVHWNTKYGDFGKAVQQPDGLAVLGIFLKVGSAKPGLQKVVDVLDSIKTKGKSADFTNFDPRGLLPESLDYWTYPGSLTTPPLLECVTWIVLKEPISVSSEQVLKFRKLNFIGEGEPEELMVDNWRPAQPLKNRQIKASFK

SEQ ID NO: 210854 - DNA, 1506 bp, Artificial Sequence
  Description of Artificial Sequence: Synthetic Construct
atggtgagcaagggcgccgagctgttcaccggcatcgtgcccatcctgatcgagctgaatggcgatgtgaatggccacaagttcagcgtgagcggcgagggcgagggcgatgccacctacggcaagctgaccctgaagttcatctgcaccaccggcaagctgcctgtgccctggcccaccctggtgaccaccctgagctacggcgtgcagtgcttctcacgctaccccgatcacatgaagcagcacgacttcttcaagagcgccatgcctgagggctacatccaggagcgcaccatcttcttcgaggatgacggcaactacaagtcgcgcgccgaggtgaagttcgagggcgataccctggtgaatcgcatcgagctgaccggcaccgatttcaaggaggatggcaacatcctgggcaataagatggagtacaactacaacgcccacaatgtgtacatcatgaccgacaaggccaagaatggcatcaaggtgaacttcaagatccgccacaacatcgaggatggcagcgtgcagctggccgaccactaccagcagaatacccccatcggcgatggccctgtgctgctgcccgataaccactacctgtccacccagagcgccctgtccaaggaccccaacgagaagcgcgatcacatgatctacttcggcttcgtgaccgccgccgccatcacccacggcatggatgagctgtacaagggatctggttcccatcactgggggtacggcaaacacaacggacctgagcactggcataaggacttccccattgccaagggagagcgccagtcccctgttgacatcgacactcatacagccaagtatgacccttccctgaagcccctgtctgtttcctatgatcaagcaacttccctgaggatcctcaacaatgatcatgctttcaacgtggtgtttgatgactctcaggacaaagcagtgctcaagggaggacccctggatggcacttacagattgattcagtttcactttcactggggttcacttgatggacaaggttcagagcatactgtggataaaaagaaatatgctgcagaacttcacttggttcactggaacaccaaatatggggattttgggaaagctgtacagcaacctgatggactggccgttctaggtatttttttgaaggttggcagcgctaaaccgggccttcagaaagttgttgatgtgctggattccattaaaacaaagggcaagagtgctgacttcactaacttcgatcctcgtggcctccttcctgaatccctggattactggacctacccaggctcactgaccacccctcctcttctggaatgtgtgacctggattgtgctcaaggaacccatcagcgtcagcagcgagcaggtgttgaaattccgtaaacttaacttcattggggagggtgaacccgaagaactgatggtggacaactggcgcccagctcagccactgaagaacaggcaaatcaaagcttccttcaaatga

SEQ ID NO: 210855 - protein, 501 aa, Artificial Sequence
  Description of Artificial Sequence: Synthetic Construct
MVSKGAELFTGIVPILIELNGDVNGHKFSVSGEGEGDATYGKLTLKFICTTGKLPVPWPTLVTTLSYGVQCFSRYPDHMKQHDFFKSAMPEGYIQERTIFFEDDGNYKSRAEVKFEGDTLVNRIELTGTDFKEDGNILGNKMEYNYNAHNVYIMTDKAKNGIKVNFKIRHNIEDGSVQLADHYQQNTPIGDGPVLLPDNHYLSTQSALSKDPNEKRDHMIYFGFVTAAAITHGMDELYKGSGSHHWGYGKHNGPEHWHKDLPIAKGERQSPVDIDTHTAKYDPSLNPLSVSYDQATSLRILNNGHAFNVEFDDSQDKAVLKGGPLDGTYRLIQFHFHWGSLDGQRSEHTVDKKKYAVELHLVHWNTKYGDFGKAVQQPDGLAVLGIFLKVGSAKPGLQKVVDVLDSIKTKGKSADFTNFDPRGLLPESLDYWTYPGSLTTPPLLECVTWIVLKEPISVSSEQVLKFRKLNFNGEGEPEELMVDNWRPAQPLKNRQIKASFK

SEQ ID NO: 210856 - DNA, 1506 bp, Artificial Sequence
  Description of Artificial Sequence: Synthetic Construct
atggtgagcaagggcgccgagctgttcaccggcatcgtgcccatcctgatcgagctgaatggcgatgtgaatggccacaagttcagcgtgagcggcgagggcgagggcgatgccacctacggcaagctgaccctgaagttcatctgcaccaccggcaagctgcctgtgccctggcccaccctggtgaccaccctgagctacggcgtgcagtgcttctcacgctaccccgatcacatgaagcagcacgacttcttcaagagcgccatgcctgagggctacatccaggagcgcaccatcttcttcgaggatgacggcaactacaagtcgcgcgccgaggtgaagttcgagggcgataccctggtgaatcgcatcgagctgaccggcaccgatttcaaggaggatggcaacatcctgggcaataagatggagtacaactacaacgcccacaatgtgtacatcatgaccgacaaggccaagaatggcatcaaggtgaacttcaagatccgccacaacatcgaggatggcagcgtgcagctggccgaccactaccagcagaatacccccatcggcgatggccctgtgctgctgcccgataaccactacctgtccacccagagcgccctgtccaaggaccccaacgagaagcgcgatcacatgatctacttcggcttcgtgaccgccgccgccatcacccacggcatggatgagctgtacaagggatctggttcccatcactgggggtacggcaaacacaacggacctgagcactggcataaggacctccccattgccaagggagagcgccagtcccctgttgacatcgacactcatacagccaagtatgacccttccctgaatcccctgtctgtttcctatgatcaagcaacttccctgaggatcctcaacaatggtcatgctttcaacgtggagtttgatgactctcaggacaaagcagtgctcaagggaggacccctggatggcacttacagattgattcagtttcactttcactggggttcacttgatggacaacgttcagagcatactgtggataaaaagaaatatgctgtagaacttcacttggttcactggaacaccaaatatggggattttgggaaagctgtgcagcaacctgatggactggccgttctaggtatttttttgaaggttggcagcgctaaaccgggccttcagaaagttgttgatgtgctggattccattaaaacaaagggcaagagtgctgacttcactaacttcgatcctcgtggcctccttcctgaatccctggattactggacctacccaggctcactgaccacccctcctcttctggaatgtgtgacctggattgtgctcaaggaacccatcagcgtcagcagcgagcaggtattgaaattccgtaaacttaacttcaatggggagggtgaacccgaagaactgatggtggacaactggcgcccagctcagccactgaagaacaggcaaatcaaagcttccttcaaatga

SEQ ID NO: 210857 - protein, 8 aa, Artificial Sequence
  Description of Artificial Sequence: Synthetic B7-1 domain
KQEHFPDN

SEQ ID NO: 210858 - DNA, 24 bp, Artificial Sequence
  Description of Artificial Sequence: Synthetic B7-1 domain
aaacaagagcactttcctgataac

SEQ ID NO: 210859 - protein, 21 aa, Artificial Sequence
  Description of Artificial Sequence: Synthetic B7-1 domain
LLPSWAITLISVNGIFVICCL

SEQ ID NO: 210860 - DNA, 63 bp, Artificial Sequence
  Description of Artificial Sequence: Synthetic B7-1 domain
ctgttgccgagctgggcgattacgcttatcagtgtaaacggcatctttgtaatatgctgtctg

SEQ ID NO: 210861 - protein, 12 aa, Artificial Sequence
  Description of Artificial Sequence: Synthetic B7-1 domain
TYCFAPRCRERR

SEQ ID NO: 210862 - DNA, 36 bp, Artificial Sequence
  Description of Artificial Sequence: Synthetic B7-1 domain
acctactgcttcgcaccaaggtgccgggagagaagg

SEQ ID NO: 210863 - protein, 32 aa, Artificial Sequence
  Description of Artificial Sequence: Synthetic Signal Sequence
GLVRRGARAGPRMPRGWTALCLLSLLPSGFMA

SEQ ID NO: 210864 - DNA, 96 bp, Artificial Sequence
  Description of Artificial Sequence: Synthetic Signal Sequence
ggcctcgtacgcagaggcgcaagggccggtcccaggatgccaaggggctggaccgctctctgcttgctgagtcttcttccatcaggatttatggca

SEQ ID NO: 210865 - protein, 22 aa, Artificial Sequence
  Description of Artificial Sequence: Synthetic Signal Sequence
MDMRVPAQLLGLLLLWLSGARC

SEQ ID NO: 210866 - DNA, 66 bp, Artificial Sequence
  Description of Artificial Sequence: Synthetic Signal Sequence
atggacatgcgggtgcctgcacaacttctgggcctgctgttgttgtggctgtctggagcccggtgt

SEQ ID NO: 210867 - protein, 162 aa, Homo sapiens; identical to SEQ ID NO: 41375

SEQ ID NO: 210868 - DNA, 2472 bp, Homo sapiens; identical to SEQ ID NO: 143825

SEQ ID NO: 210869 - DNA, 342 bp, Artificial Sequence
  Description of Artificial Sequence: Synthetic Construct
aattgggtaaatgttatcagtgatctcaagaagatagaggatctcatccagtccatgcatattgatgccacgctgtacacagaaagcgatgtgcatcctagctgtaaggtgacagcgatgaagtgttttcttttggagctgcaggtaattagtcttgagtccggcgatgccagcattcatgataccgtagaaaacttgattatcctggccaacaattctctgtcctcaaacggaaacgtaaccgagagcggttgtaaagaatgtgaagaactggaagaaaagaacatcaaggagtttctgcaatcattcgttcacatcgtacaaatgttcataaatacgtca

SEQ ID NO: 210870 - protein, 133 aa, Artificial Sequence
  Description of Artificial Sequence: Synthetic Construct
GIHVFILGCFSAGLPKTEANWVNVISDLKKIEDLIQSMHIDATLYTESDVHPSCKVTAMKCFLLELQVISLESGDASIHDTVENLIILANNSLSSNGNVTESGCKECEELEEKNIKEFLQSFVHIVQMFINTS

SEQ ID NO: 210871 - DNA, 399 bp, Artificial Sequence
  Description of Artificial Sequence: Synthetic Construct
ggcatacacgtcttcatactcggctgtttttctgcgggcttgcccaaaaccgaggcaaattgggtaaatgttatcagtgatctcaagaagatagaggatctcatccagtccatgcatattgatgccacgctgtacacagaaagcgatgtgcatcctagctgtaaggtgacagcgatgaagtgttttcttttggagctgcaggtaattagtcttgagtccggcgatgccagcattcatgataccgtagaaaacttgattatcctggccaacaattctctgtcctcaaacggaaacgtaaccgagagcggttgtaaagaatgtgaagaactggaagaaaagaacatcaaggagtttctgcaatcattcgttcacatcgtacaaatgttcataaatacgtca

SEQ ID NO: 210872 - protein, 385 aa, Homo sapiens; identical to SEQ ID NO: 13098

SEQ ID NO: 210873 - DNA, 8246 bp, Homo sapiens; identical to SEQ ID NO: 115548

SEQ ID NO: 210874 - protein, 468 aa, Artificial Sequence
  Description of Artificial Sequence: Synthetic Construct
MDMRVPAQLLGLLLLWLSGARCNWVNVISDLKKIEDLIQSMHIDATLYTESDVHPSCKVTAMKCFLLELQVISLESGDASIHDTVENLIILANNSLSSNGNVTESGCKECEELEEKNIKEFLQSFVHIVQMFINTSGSGSGSGSGSGSGSGSGSGSGSGSGSGSGSKQEHFPDNLLPSWAITLISVNGIFVICCLTYCFAPRCRERRGSSHHWGYGKHNGPEHWHKDFPIAKGERQSPVDIDTHTAKYDPSLKPLSVSYDQATSLRILNNGHAFNVEFDDSQDKAVLKGGPLDGTYRLIQFHFHWGSLDGQGSEHTVDKKKYAAELHLVHWNTKYGDFGKAVQQPDGLAVLGIFLKVGSAKPGHQKVVDVLDSIKTKGKSADFTNFDPRGLLPESLDYWTYPGSLTTPPLLECVTWIVLKEPISVSSEQVLKFRKLNFNGEGEPEELMVDNWRPAQPLKNRQIKASFK

SEQ ID NO: 210875 - DNA, 1407 bp, Artificial Sequence
  Description of Artificial Sequence: Synthetic Construct
atggacatgcgggtgcctgcacaacttctgggcctgctgttgttgtggctgtctggagcccggtgtaattgggtaaatgttatcagtgatctcaagaagatagaggatctcatccagtccatgcatattgatgccacgctgtacacagaaagcgatgtgcatcctagctgtaaggtgacagcgatgaagtgttttcttttggagctgcaggtaattagtcttgagtccggcgatgccagcattcatgataccgtagaaaacttgattatcctggccaacaattctctgtcctcaaacggaaacgtaaccgagagcggttgtaaagaatgtgaagaactggaagaaaagaacatcaaggagtttctgcaatcattcgttcacatcgtacaaatgttcataaatacgtcaggatctggttctggttccggaagtggatctggttcagggtccggtagtggatctgggtcaggaagtggaagcggtagtgggtctggatctaaacaagagcactttcctgataacctgttgccgagctgggcgattacgcttatcagtgtaaacggcatctttgtaatatgctgtctgacctactgcttcgcaccaaggtgccgggagagaaggggatcctcccatcactgggggtacggcaaacacaacggacctgagcactggcataaggacttccccattgccaagggagagcgccagtcccctgttgacatcgacactcatacagccaagtatgacccttccctgaagcccctgtctgtttcctatgatcaagcaacttccctgagaatcctcaacaatggtcatgctttcaacgtggagtttgatgactctcaggacaaagcagtgctcaagggaggacccctggatggcacttacagattgattcagtttcactttcactggggttcacttgatggacaaggttcagagcatactgtggataaaaagaaatatgctgcagaacttcacttggttcactggaacaccaaatatggggattttgggaaagctgtgcagcaacctgatggactggccgttctaggtatttttttgaaggttggcagcgctaaaccgggccatcagaaagttgttgatgtgctggattccattaaaacaaagggcaagagtgctgacttcactaacttcgatcctcgtggcctccttcctgaatccctggattactggacctacccaggctcactgaccacccctcctcttctggaatgtgtgacctggattgtgctcaaggaacccatcagcgtcagcagcgagcaggtgttgaaattccgtaaacttaacttcaatggggagggtgaacccgaagaactgatggtggacaactggcgcccagctcagccactgaagaacaggcaaatcaaagcttccttcaaataa

SEQ ID NO: 210876 - protein, 267 aa, Artificial Sequence
  Description of Artificial Sequence: Synthetic Construct
MGLVRRGARAGPRMPRGWTALCLLSLLPSGFMAGIHVFILGCFSAGLPKTEANWVNVISDLKKIEDLIQSMHIDATLYTESDVHPSCKVTAMKCFLLELQVISLESGDASIHDTVENLIILANNSLSSNGNVTESGCKECEELEEKNIKEFLQSFVHIVQMFINTSGSGSGSGSGSGSGSGSGSGSGSGSGSGSGSTTTPAPRPPTPAPTIASQPLSLRPEACRPAAGGAVHTRGLDFACDIYIWAPLAGTCGVLLLSLVITLYCGS

SEQ ID NO: 210877 - DNA, 804 bp, Artificial Sequence
  Description of Artificial Sequence: Synthetic Construct
atgggcctcgtacgcagaggcgcaagggccggtcccaggatgccaaggggctggaccgctctctgcttgctgagtcttcttccatcaggatttatggcaggcatacacgtcttcatactcggctgtttttctgcgggcttgcccaaaaccgaggcaaattgggtaaatgttatcagtgatctcaagaagatagaggatctcatccagtccatgcatattgatgccacgctgtacacagaaagcgatgtgcatcctagctgtaaggtgacagcgatgaagtgttttcttttggagctgcaggtaattagtcttgagtccggcgatgccagcattcatgataccgtagaaaacttgattatcctggccaacaattctctgtcctcaaacggaaacgtaaccgagagcggttgtaaagaatgtgaagaactggaagaaaagaacatcaaggagtttctgcaatcattcgttcacatcgtacaaatgttcataaatacgtcaggatctggttctggttccggaagtggatctggttcagggtccggtagtggatctgggtcaggaagtggaagcggtagtgggtctggatctaccacaaccccagcacctcgcccaccaacaccagcaccaaccatcgcatcccagccactgtctctgaggcccgaggcatgtaggcctgcagcaggaggcgccgtgcacaccaggggcctggactttgcctgcgatatctatatctgggcaccactggcaggaacatgtggcgtgctgctgctgtccctggtcatcaccctgtattgcggatcctga

SEQ ID NO: 210878 - protein, 209 aa, Artificial Sequence
  Description of Artificial Sequence: Synthetic Construct
MDMRVPAQLLGLLLLWLSGARCNWVNVISDLKKIEDLIQSMHIDATLYTESDVHPSCKVTAMKCFLLELQVISLESGDASIHDTVENLIILANNSLSSNGNVTESGCKECEELEEKNIKEFLQSFVHIVQMFINTSGSGSGSGSGSGSGSGSGSGSGSGSGSGSGSKQEHFPDNLLPSWAITLISVNGIFVICCLTYCFAPRCRERRGS

SEQ ID NO: 210879 - DNA, 630 bp, Artificial Sequence
  Description of Artificial Sequence: Synthetic Construct
atggacatgcgggtgcctgcacaacttctgggcctgctgttgttgtggctgtctggagcccggtgtaattgggtaaatgttatcagtgatctcaagaagatagaggatctcatccagtccatgcatattgatgccacgctgtacacagaaagcgatgtgcatcctagctgtaaggtgacagcgatgaagtgttttcttttggagctgcaggtaattagtcttgagtccggcgatgccagcattcatgataccgtagaaaacttgattatcctggccaacaattctctgtcctcaaacggaaacgtaaccgagagcggttgtaaagaatgtgaagaactggaagaaaagaacatcaaggagtttctgcaatcattcgttcacatcgtacaaatgttcataaatacgtcaggatctggttctggttccggaagtggatctggttcagggtccggtagtggatctgggtcaggaagtggaagcggtagtgggtctggatctaaacaagagcactttcctgataacctgttgccgagctgggcgattacgcttatcagtgtaaacggcatctttgtaatatgctgtctgacctactgcttcgcaccaaggtgccgggagagaaggggatcctaa

SEQ ID NO: 210880 - protein, 30 aa, Artificial Sequence
  Description of Artificial Sequence: Synthetic Linker
GSGSGSGSGSGSGSGSGSGSGSGSGSGSGS

SEQ ID NO: 210881 - DNA, 90 bp, Artificial Sequence
  Description of Artificial Sequence: Synthetic Linker
ggatctggttctggttccggaagtggatctggttcagggtccggtagtggatctgggtcaggaagtggaagcggtagtgggtctggatct

SEQ ID NO: 210882 - protein, 12 aa, Artificial Sequence
  Description of Artificial Sequence: Synthetic Linker
GGSGGGSGGGSG

SEQ ID NO: 210883 - DNA, 36 bp, Artificial Sequence
  Description of Artificial Sequence: Synthetic Linker
ggaggatccggaggtggaagtggaggtggatctggt

SEQ ID NO: 210884 - protein, 306 aa, Homo sapiens
IWELKKDVYVVELDWYPDAPGEMVVLTCDTPEEDGITWTLDQSSEVLGSGKTLTIQVKEFGDAGQYTCHKGGEVLSHSLLLLHKKEDGIWSTDILKDQKEPKNKTFLRCEAKNYSGRFTCWWLTTISTDLTFSVKSSRGSSDPQGVTCGAATLSAERVRGDNKEYEYSVECQEDSACPAAEESLPIEVMVDAVHKLKYENYTSSFFIRDIIKPDPPKNLQLKPLKNSRQVEVSWEYPDTWSTPHSYFSLTFCVQVQGKSKREKKDRVFTDKTSATVICRKNASISVRAQDRYYSSSWSEWASVPCS

SEQ ID NO: 210885 - DNA, 918 bp, Artificial Sequence
  Description of Artificial Sequence: Synthetic Construct
atctgggagctgaagaaggacgtgtacgtggtggagctggactggtatcccgatgcccctggcgagatggtggtgctgacctgcgacacacctgaggaggatggcatcacctggacactggatcagtctagcgaggtgctgggcagcggcaagaccctgacaatccaggtgaaggagttcggcgacgccggccagtacacatgtcacaagggcggcgaggtgctgtctcacagcctgctgctgctgcacaagaaggaggacggcatttggtccacagacatcctgaaggatcagaaggagccaaagaacaagaccttcctgcggtgcgaggccaagaattatagcggccggttcacctgttggtggctgaccacaatcagcaccgatctgacattttccgtgaagtcctctaggggcagctccgacccccagggcgtgacatgcggagcagccaccctgtccgccgagagggtgcgcggcgataacaaggagtacgagtattccgtggagtgccaggaggactctgcctgtccagcagcagaggagagcctgcctatcgaagtgatggtggatgccgtgcacaagctgaagtacgagaattatacatctagcttctttatccgggacatcatcaagcccgatccacccaagaacctgcagctgaagcctctgaagaattctagacaggtggaggtgagctgggagtacccagacacctggtccacaccccactcttatttcagcctgaccttttgcgtgcaggtgcagggcaagagcaagagggagaagaaggaccgcgtgttcaccgataagacatccgccaccgtgatctgtaggaagaacgcctccatctctgtgagggcccaggatcgctactattcctctagctggtccgagtgggcctctgtgccctgtagc

SEQ ID NO: 210886 - DNA, 918 bp, Artificial Sequence
  Description of Artificial Sequence: Synthetic Construct
atctgggagctgaagaaggacgtgtacgtggtggagctggactggtatcccgatgcccctggcgagatggtggtgctgacctgcgacacaccagaggaggatggcatcacctggacactggatcagtctagcgaggtgctgggcagcggcaagaccctgacaatccaggtgaaggagttcggcgacgccggccagtacacatgtcacaagggcggcgaggtgctgtctcacagcctgctgctgctgcacaagaaggaggacggcatttggtccacagacatcctgaaggatcagaaggagccaaagaacaagaccttcctgcggtgcgaggccaagaattatagcggccggttcacctgttggtggctgaccacaatcagcaccgatctgacattttccgtgaagtcctctaggggcagctccgacccccagggcgtgacatgcggagcagccaccctgtccgccgagagggtgcgcggcgataacaaggagtacgagtattccgtggagtgccaggaggactctgcctgtccagcagcagaggagagcctgcctatcgaagtgatggtggatgccgtgcacaagctgaagtacgagaattatacatctagcttctttatccgggacatcatcaagcccgatccacccaagaacctgcagctgaagcctctgaagaattctagacaggtggaggtgagctgggagtacccagacacctggtccacaccccactcttatttcagcctgaccttttgcgtgcaggtgcagggcaagtccaagagggagaagaaggaccgcgtgttcaccgataagacatctgccaccgtgatctgtaggaagaacgcctccatctctgtgagggcccaggatcgctactattcctctagctggtccgagtgggcctctgtgccctgtagc

SEQ ID NO: 210887 - DNA, 918 bp, Artificial Sequence
  Description of Artificial Sequence: Synthetic Construct
atctgggagctgaagaaggacgtgtacgtggtggagctggactggtatcccgatgcccctggcgagatggtggtgctgacctgcgacacacctgaggaggatggcatcacctggacactggatcagtctagcgaggtgctgggctccggcaagaccctgacaatccaggtgaaggagttcggcgacgccggccagtacacatgtcacaagggcggcgaggtgctgtctcacagcctgctgctgctgcacaagaaggaggacggcatctggtccacagacatcctgaaggatcagaaggagccaaagaacaagaccttcctgaggtgcgaggccaagaattatagcggccgctttacctgttggtggctgaccacaatcagcaccgatctgacattttccgtgaagtcctctaggggcagctccgacccccagggcgtgacatgcggagcagccaccctgtccgccgagcgggtgagaggcgataacaaggagtacgagtattccgtggagtgccaggaggactctgcctgtccagcagcagaggagagcctgcctatcgaagtgatggtggatgccgtgcacaagctgaagtacgagaattatacatctagcttctttatcagggacatcatcaagcccgatccacccaagaacctgcagctgaagcctctgaagaattctcgccaggtggaggtgagctgggagtacccagacacctggagcacaccccactcttatttcagcctgaccttttgcgtgcaggtgcagggcaagtctaagcgggagaagaaggacagagtgttcaccgataagacaagcgccaccgtgatctgtcggaagaacgcctccatctctgtgcgggcccaggatagatactattcctctagctggtccgagtgggcctctgtgccctgtagc

SEQ ID NO: 210888 - DNA, 918 bp, Artificial Sequence
  Description of Artificial Sequence: Synthetic Construct
atctgggagctgaagaaggacgtgtacgtggtggagctggactggtatcccgatgcccctggcgagatggtggtgctgacctgcgacacacctgaggaggatggcatcacctggacactggatcagagctccgaggtgctgggaagcggcaagaccctgacaatccaggtgaaggagttcggcgacgccggccagtacacatgtcacaagggcggcgaggtgctgtctcacagcctgctgctgctgcacaagaaggaggacggcatttggtccacagacatcctgaaggatcagaaggagccaaagaacaagaccttcctgaggtgcgaggccaagaattatagcggccgctttacctgttggtggctgaccacaatcagcaccgatctgacattttccgtgaagtctagcagaggctcctctgacccccagggcgtgacatgcggagcagccaccctgtccgccgagcgggtgagaggcgataacaaggagtacgagtattccgtggagtgccaggaggactctgcctgtcctgcagcagaggagagcctgccaatcgaagtgatggtggatgccgtgcacaagctgaagtacgagaattatacaagctccttctttatcagggacatcatcaagcctgatccccctaagaacctgcagctgaagccactgaagaattctcgccaggtggaggtgagctgggagtacccagacacctggtccacaccccactcttatttcagcctgaccttttgcgtgcaggtgcagggcaagagcaagagggagaagaaggaccgcgtgttcaccgataagacatccgccaccgtgatctgtcggaagaacgcctccatctctgtgcgggcccaggatagatactattctagctcctggtccgagtgggcctctgtgccctgtagc

SEQ ID NO: 210889 - DNA, 918 bp, Artificial Sequence
  Description of Artificial Sequence: Synthetic Construct
atctgggagctgaagaaggacgtgtacgtggtggagctggactggtatcccgatgcccctggcgagatggtggtgctgacctgcgacacacctgaggaggatggcatcacctggacactggatcagagctccgaggtgctgggaagcggcaagaccctgacaatccaggtgaaggagttcggcgacgccggccagtacacatgtcacaagggcggcgaggtgctgtctcacagcctgctgctgctgcacaagaaggaggacggcatttggtccacagacatcctgaaggatcagaaggagccaaagaacaagaccttcctgcggtgcgaggccaagaattatagcggccggttcacctgttggtggctgaccacaatcagcaccgatctgacattttccgtgaagtctagccggggctcctctgacccacagggagtgacatgcggagcagccaccctgtccgccgagcgggtgagaggcgataacaaggagtacgagtattccgtggagtgccaggaggactctgcctgtcctgcagcagaggagagcctgccaatcgaagtgatggtggatgccgtgcacaagctgaagtacgagaattatacaagctccttctttatcagggacatcatcaagcctgatccccctaagaacctgcagctgaagccactgaagaattctcgccaggtggaggtgagctgggagtacccagacacctggtccacaccccactcttatttcagcctgaccttttgcgtgcaggtgcagggcaagtccaagcgggagaagaaggacagagtgttcaccgataagacatctgccaccgtgatctgtcggaagaacgcctccatctctgtgagggcccaggatcgctactattctagctcctggagcgagtgggcatccgtgccatgttct

SEQ ID NO: 210890 - DNA, 918 bp, Artificial Sequence
  Description of Artificial Sequence: Synthetic Construct
atctgggagctcaagaaagacgtgtacgtggtggaactggactggtaccccgacgcccctggcgaaatggtggtgctgacatgcgacacccctgaggaggatggcattacctggaccctcgatcagagctccgaggtgctgggcagcggcaaaaccctgaccatccaggtgaaggagtttggcgatgccggccagtacacatgtcacaagggcggcgaggtgctgagccactccctgctgctgctccacaagaaggaagatggcatctggagcaccgacattctgaaggatcagaaggagcccaagaacaagacattcctgaggtgtgaggccaagaactacagcggcaggtttacctgctggtggctgacaacaatcagcaccgacctcacattctccgtcaagtcctccaggggttcttccgaccctcaaggcgtgacatgcggcgctgccaccctgagcgctgagagagtcaggggcgacaacaaggagtacgagtacagcgtcgaatgtcaggaggacagcgcctgtcccgccgctgaagagagcctgcctatcgaggtgatggtggacgccgtgcacaaactgaagtatgagaattacacctccagcttcttcatcagggacatcatcaaacccgatccccccaagaacctgcagctgaagcctctgaagaacagcagacaggtcgaagtgtcctgggagtaccctgatacctggtccacaccccacagctacttcagcctgaccttttgcgtgcaggtgcagggcaagagcaaaagggagaagaaggacagggtgtttaccgacaagacctccgccacagtgatttgcagaaagaacgcctccatcagcgtgagggcccaggacaggtattacagcagctcctggagcgaatgggctagcgtgccctgtagc

SEQ ID NO: 210891 - DNA, 918 bp, Artificial Sequence
  Description of Artificial Sequence: Synthetic Construct
atctgggagctgaagaaggacgtgtacgtggtggagctggactggtatcccgatgcccctggcgagatggtggtgctgacctgcgacacacccgaggaggatggcatcacctggacactggatcagtctagcgaggtgctgggctccggcaagaccctgacaatccaggtgaaggagttcggcgacgccggccagtacacctgtcacaagggcggcgaggtgctgtcccactctctgctgctgctgcacaagaaggaggacggcatctggtctacagacatcctgaaggatcagaaggagcctaagaacaagaccttcctgcggtgcgaggccaagaattatagcggccggttcacctgttggtggctgaccacaatcagcaccgatctgacattttccgtgaagtcctctcggggcagctccgacccacagggagtgacatgcggagcagccaccctgtccgccgagagggtgcgcggcgataacaaggagtacgagtattccgtggagtgccaggaggactctgcctgtccagcagcagaggagagcctgccaatcgaagtgatggtggatgccgtgcacaagctgaagtacgagaattatacatctagcttctttatccgggacatcatcaagcccgatccccctaagaacctgcagctgaagcctctgaagaattctagacaggtggaggtgagctgggagtaccccgacacctggagcacacctcacagctatttctccctgaccttttgcgtgcaggtgcagggcaagtccaagagggagaagaaggaccgcgtgttcaccgataagacatctgccaccgtgatctgtcggaagaacgccagcatctccgtgagggcccaggatcgctactattcctctagctggtctgagtgggccagcgtgccctgttcc

SEQ ID NO: 210892 - DNA, 918 bp, Artificial Sequence
  Description of Artificial Sequence: Synthetic Construct
atctgggagctgaagaaggacgtgtacgtggtggagctggactggtatcctgatgccccaggcgagatggtggtgctgacatgcgacacccccgaggaggatggcatcacatggaccctggatcagtcctctgaggtgctgggctccggcaagacactgaccatccaggtgaaggagttcggcgacgccggccagtacacctgtcacaagggaggagaggtgctgagccactccctgctgctgctgcacaagaaggaggacggcatctggtccaccgacatcctgaaggatcagaaggagcccaagaacaagacattcctgagatgcgaggccaagaattatagcggcaggtttacctgttggtggctgacaaccatctccacagatctgaccttttctgtgaagagctcccggggctctagcgaccctcagggagtgacctgcggagcagccacactgtccgccgagcgggtgagaggcgataacaaggagtacgagtattccgtggagtgccaggaggactctgcctgtcctgcagcagaggagagcctgccaatcgaagtgatggtggatgccgtgcacaagctgaagtacgagaattatacctcctctttctttatcagagacatcatcaagccagatcctccaaagaacctgcagctgaagcccctgaagaatagcaggcaggtggaggtgtcctgggagtacccagacacatggagcaccccccacagctatttctccctgacattttgcgtgcaggtgcagggcaagtccaagcgcgagaagaaggaccgggtgttcacagataagacctctgccacagtgatctgtcgcaagaacgcctctatcagcgtgcgcgcccaggatcggtactatagctcctcttggtctgagtgggccagcgtgccttgttcc

SEQ ID NO: 210893 - DNA, 918 bp, Artificial Sequence
  Description of Artificial Sequence: Synthetic Construct
atctgggagctgaagaaggacgtgtacgtggtggagctggactggtatcccgatgcccctggcgagatggtggtgctgacctgcgacacacctgaggaggatggcatcacctggacactggatcagagctccgaggtgctgggcagcggcaagaccctgacaatccaggtgaaggagttcggcgacgccggccagtacacatgtcacaagggcggcgaggtgctgtctcacagcctgctgctgctgcacaagaaggaggacggcatctggtccacagacatcctgaaggatcagaaggagccaaagaacaagaccttcctgaggtgcgaggccaagaattattctggcaggttcacctgttggtggctgaccacaatcagcaccgatctgacattttccgtgaagtctagccggggctcctctgacccccagggagtgacatgcggagcagccaccctgtccgccgagagggtgagaggcgataacaaggagtacgagtattccgtggagtgccaggaggactctgcctgtcctgcagcagaggagagcctgccaatcgaagtgatggtggatgccgtgcacaagctgaagtacgagaattatacaagctccttctttatcagggacatcatcaagcctgatccccctaagaacctgcagctgaagccactgaagaattctagacaggtggaggtgagctgggagtacccagacacctggagcacaccccactcctatttctctctgaccttttgcgtgcaggtgcagggcaagagcaagagggagaagaaggacagagtgttcaccgataagacatccgccaccgtgatctgtcggaagaacgcctccatctctgtgcgggcccaggatcgctactattctagctcctggagcgagtgggcatccgtgccatgttct

SEQ ID NO: 210894 - DNA, 921 bp, Homo sapiens
atatgggaactgaagaaagatgtttatgtcgtagaattggattggtatccggatgcccctggagaaatggtggtcctcacctgtgacacccctgaagaagatggtatcacctggaccttggaccagagcagtgaggtcttaggctctggcaaaaccctgaccatccaagtcaaagagtttggagatgctggccagtacacctgtcacaaaggaggcgaggttctaagccattcgctcctgctgcttcacaaaaaggaagatggaatttggtccactgatattttaaaggaccagaaagaacccaaaaataagacctttctaagatgcgaggccaagaattattctggacgtttcacctgctggtggctgacgacaatcagtactgatttgacattcagtgtcaaaagcagcagaggctcttctgacccccaaggggtgacgtgcggagctgctacactctctgcagagagagtcagaggggacaacaaggagtatgagtactcagtggagtgccaggaggacagtgcctgcccagctgctgaggagagtctgcccattgaggtcatggtggatgccgttcacaagctcaagtatgaaaactacaccagcagcttcttcatcagggacatcatcaaacctgacccacccaagaacttgcagctgaagccattaaagaattctcggcaggtggaggtcagctgggagtaccctgacacctggagtactccacattcctacttctccctgacattctgcgttcaggtccagggcaagagcaagagagaaaagaaagatagagtcttcacggacaagacctcagccacggtcatctgccgcaaaaatgccagcattagcgtgcgggcccaggaccgctactatagctcatcttggagcgaatgggcatctgtgccctgcagttag

SEQ ID NO: 210895 - protein, 306 aa, Artificial Sequence
  Description of Artificial Sequence: Synthetic Construct
IWELKKDVYVVELDWYPDAPGEMVVLTCDTPEEDGITWTLDQSSEVLGSGKTLTIQVKEFGDAGQYTCHKGGEVLSHSLLLLHKKEDGIWSTDILKDQKEPKNKTFLRCEAKNYSGRFTCWWLTTISTDLTFSVKSSRGSSDPQGVTCGAATLSAERVRGDNKEYEYSVECQEDSACPAAEESLPIEVMVDAVHKLKYENYTSSFFIRDIIKPDPPNNLQLKPLKNSRQVEVSWEYPDTWSTPHSYFSLTFCVQVQGKSKREKKDRVFTDKTSATVICRKNASISVRAQDRYYSSSWSEWASVPCS

SEQ ID NO: 210896 - DNA, 918 bp, Artificial Sequence
  Description of Artificial Sequence: Synthetic Construct
atatgggaactgaagaaagatgtttatgtcgtagaattggattggtatccggatgcccctggagaaatggtggtcctcacctgtgacacccctgaagaagatggtatcacctggaccttggaccagagcagtgaggtcttaggctctggcaaaaccctgaccatccaagtcaaagagtttggagatgctggccagtacacctgtcacaaaggaggcgaggttctaagccattcgctcctgctgcttcacaaaaaggaagatggaatttggtccactgatattttaaaggaccagaaagaacccaaaaataagacctttctaagatgcgaggccaagaattattctggacgtttcacctgctggtggctgacgacaatcagtactgatttgacattcagtgtcaaaagcagcagaggctcttctgacccccaaggggtgacgtgcggagctgctacactctctgcagagagagtcagaggggacaacaaggagtatgagtactcagtggagtgccaggaggacagtgcctgcccagctgctgaggagagtctgcccattgaggtcatggtggatgccgttcacaagctcaagtatgaaaactacaccagcagcttcttcatcagggacatcatcaaacctgacccacccaacaacttgcagctgaagccattaaagaattctcggcaggtggaggtcagctgggagtaccctgacacctggagtactccacattcctacttctccctgacattctgcgttcaggtccagggcaagagcaagagagaaaagaaagatagagtcttcaccgacaagacctcagccacggtcatctgccgcaaaaatgccagcattagcgtgcgggcccaggaccgctactatagctcatcttggagcgaatgggcatctgtgccctgcagt

SEQ ID NO: 210897 - DNA, 759 bp, Artificial Sequence
  Description of Artificial Sequence: Synthetic Construct
atgtggccccctgggtcagcctcccagccaccgccctcacctgccgcggccacaggtctgcatccagcggctcgccctgtgtccctgcagtgccggctcagcatgtgtccagcgcgcagcctcctccttgtggctaccctggtcctcctggaccacctcagtttggccagaaacctccccgtggccactccagacccaggaatgttcccatgccttcaccactcccaaaacctgctgagggccgtcagcaacatgctccagaaggccagacaaactctagaattttacccttgcacttctgaagagattgatcatgaagatatcacaaaagataaaaccagcacagtggaggcctgtttaccattggaattaaccaagaatgagagttgcctaaattccagagagacctctttcataactaatgggagttgcctggcctccagaaagacctcttttatgatggccctgtgccttagtagtatttatgaagacttgaagatgtaccaggtggagttcaagaccatgaatgcaaagcttctgatggaccctaagaggcagatctttctagatcaaaacatgctggcagttattgatgagctgatgcaggccctgaatttcaacagtgagactgtgccacaaaaatcctcccttgaagaaccggatttttataaaactaaaatcaagctctgcatacttcttcatgctttcagaattcgggcagtgactattgatagagtgatgagctatctgaatgcttcc

SEQ ID NO: 210898 - protein, 197 aa, Homo sapiens
RNLPVATPDPGMFPCLHHSQNLLRAVSNMLQKARQTLEFYPCTSEEIDHEDITKDKTSTVEACLPLELTKNESCLNSRETSFITNGSCLASRKTSFMMALCLSSIYEDLKMYQVEFKTMNAKLLMDPKRQIFLDQNMLAVIDELMQALNFNSETVPQKSSLEEPDFYKTKIKLCILLHAFRIRAVTIDRVMSYLNAS

SEQ ID NO: 210899 - DNA, 591 bp, Artificial Sequence
  Description of Artificial Sequence: Synthetic Construct
agaaatctgccagtggcaacccctgacccaggaatgttcccttgcctgcaccacagccagaacctgctgcgggccgtgtccaatatgctgcagaaggccagacagacactggagttttacccttgtacctctgaggagatcgaccacgaggatatcacaaaggataagaccagcacagtggaggcctgcctgccactggagctgaccaagaacgagtcctgtctgaacagccgggaaaccagcttcatcaccaacggctcctgcctggcctctcgcaagaccagcttcatgatggccctgtgcctgtctagcatctacgaggacctgaagatgtatcaggtggagttcaagaccatgaacgccaagctgctgatggaccctaagaggcagatctttctggatcagaatatgctggccgtgatcgacgagctgatgcaggccctgaacttcaatagcgagacagtgccacagaagtcctctctggaggagcccgatttctacaagaccaagatcaagctgtgcatcctgctgcacgcctttaggatccgcgccgtgaccatcgacagagtgatgtcctatctgaacgcctct

SEQ ID NO: 210900 - DNA, 591 bp, Artificial Sequence
  Description of Artificial Sequence: Synthetic Construct
agaaatctgccagtggcaacccctgacccaggaatgttcccttgcctgcaccacagccagaacctgctgagggccgtgtccaatatgctgcagaaggcccgccagacactggagttttacccttgtaccagcgaggagatcgaccacgaggatatcacaaaggataagacctccacagtggaggcctgcctgccactggagctgaccaagaacgagagctgtctgaattcccgggagacatctttcatcaccaacggcagctgcctggcctccagaaagacatcttttatgatggccctgtgcctgtctagcatctacgaggacctgaagatgtatcaggtggagttcaagaccatgaacgccaagctgctgatggaccctaagaggcagatctttctggatcagaatatgctggccgtgatcgacgagctgatgcaggccctgaacttcaatagcgagacagtgccacagaagtcctctctggaggagcccgatttctacaagaccaagatcaagctgtgcatcctgctgcacgcctttaggatccgcgccgtgaccatcgaccgcgtgatgtcttatctgaacgcatcc

SEQ ID NO: 210901 - DNA, 591 bp, Artificial Sequence
  Description of Artificial Sequence: Synthetic polynucleotide
cgcaatctgccagtggcaacccctgacccaggaatgttcccttgcctgcaccacagccagaacctgctgcgggccgtgtccaatatgctgcagaaggcccgccagacactggagttttacccttgtacctctgaggagatcgaccacgaggatatcacaaaggataagaccagcacagtggaggcctgcctgccactggagctgaccaagaacgagagctgtctgaattccagggagacatctttcatcaccaacggcagctgcctggcctccagaaagacatcttttatgatggccctgtgcctgtctagcatctacgaggacctgaagatgtatcaggtggagttcaagaccatgaacgccaagctgctgatggaccctaagaggcagatctttctggatcagaatatgctggccgtgatcgacgagctgatgcaggccctgaacttcaattccgagacagtgccacagaagtcctctctggaggagcccgatttctacaagaccaagatcaagctgtgcatcctgctgcacgccttcaggatcagggccgtgaccatcgacagagtgatgagctatctgaacgccagc

SEQ ID NO: 210902 - DNA, 591 bp, Artificial Sequence
  Description of Artificial Sequence: Synthetic polynucleotide
agaaacctgcctgtcgctacccccgaccccggaatgttcccctgcctgcaccactcccagaacctcctgagggccgtgtccaacatgctgcagaaggctagacagaccctcgaattctacccctgtaccagcgaggagatcgaccatgaggacatcaccaaggataagaccagcaccgtggaggcttgcctgcctctggagctgaccaaaaacgagagctgcctgaacagcagggaaaccagcttcattaccaacggctcctgcctggcctccaggaagacatccttcatgatggccctgtgcctcagcagcatctacgaggacctgaagatgtatcaggtggagtttaagaccatgaatgccaagctgctgatggaccctaagaggcagatcttcctggaccagaatatgctggccgtgattgacgagctgatgcaggccctcaactttaacagcgagaccgtgccccagaaaagcagcctcgaagagcctgacttctacaaaaccaagattaagctgtgtatcctgctgcacgccttcaggatcagggccgtgaccatcgacagggtgatgagctacctgaacgccagt

SEQ ID NO: 210903 - DNA, 591 bp, Artificial Sequence
  Description of Artificial Sequence: Synthetic polynucleotide
cgcaatctgccagtggccacccctgacccaggcatgttcccctgcctgcaccacagccagaacctgctgagggccgtgtccaatatgctgcagaaggcccgccagacactggagttttacccttgtacctctgaggagatcgaccacgaggatatcacaaaggataagaccagcacagtggaggcctgcctgccactggagctgaccaagaacgagtcctgtctgaacagccgggaaaccagcttcatcaccaacggctcctgcctggcctctcgcaagaccagcttcatgatggccctgtgcctgtcctctatctacgaggacctgaagatgtatcaggtggagttcaagaccatgaacgccaagctgctgatggaccctaagcggcagatctttctggatcagaatatgctggccgtgatcgacgagctgatgcaggccctgaacttcaatagcgagacagtgccacagaagagctccctggaggagcccgatttctacaagaccaagatcaagctgtgcatcctgctgcacgcctttcggatcagagccgtgaccatcgacagagtgatgtcctatctgaatgcctct

SEQ ID NO: 210904 - DNA, 591 bp, Artificial Sequence
  Description of Artificial Sequence: Synthetic polynucleotide
agaaatctgccagtggccacccctgacccaggcatgttcccctgcctgcaccactctcagaacctgctgcgggccgtgagcaatatgctgcagaaggccagacagacactggagttttacccttgtacctccgaggagatcgaccacgaggatatcacaaaggataagacctctacagtggaggcctgcctgccactggagctgaccaagaacgagtcctgtctgaacagccgggaaaccagcttcatcaccaacggctcctgcctggcctctagaaagaccagcttcatgatggccctgtgcctgtcctctatctacgaggacctgaagatgtatcaggtggagttcaagaccatgaacgccaagctgctgatggaccctaagaggcagatctttctggatcagaatatgctggccgtgatcgacgagctgatgcaggccctgaacttcaatagcgagacagtgccacagaagagctccctggaggagcccgatttctacaagaccaagatcaagctgtgcatcctgctgcacgcctttaggatccgcgccgtgaccatcgaccgcgtgatgtcctatctgaatgcctct

SEQ ID NO: 210905 - DNA, 591 bp, Artificial Sequence
  Description of Artificial Sequence: Synthetic polynucleotide
agaaatctgccagtggccacccctgacccaggcatgttcccctgcctgcaccacagccagaacctgctgagggccgtgtccaatatgctgcagaaggcccgccagacactggagttttacccctgtaccagcgaggagatcgaccacgaggatatcacaaaggataagacctccacagtggaggcctgcctgcctctggagctgaccaagaacgagtcttgtctgaatagcagggagacatccttcatcaccaacggctcttgcctggccagccgcaagacatcctttatgatggccctgtgcctgtcctctatctacgaggacctgaagatgtatcaggtggagttcaagaccatgaacgccaagctgctgatggaccctaagaggcagatctttctggatcagaatatgctggccgtgatcgacgagctgatgcaggccctgaacttcaattccgagacagtgcctcagaagagctccctggaggagccagatttctacaagaccaagatcaagctgtgcatcctgctgcacgcctttcggatcagagccgtgaccatcgaccgcgtgatgtcttatctgaatgccagc

SEQ ID NO: 210906 - DNA, 591 bp, Artificial Sequence
  Description of Artificial Sequence: Synthetic polynucleotide
cggaatctgcctgtggcaacccccgaccctggaatgttcccatgcctgcaccacagccagaacctgctgcgcgccgtgtccaatatgctgcagaaggcccggcagaccctggagttttacccatgtacaagcgaggagatcgaccacgaggatatcaccaaggataagacatccaccgtggaggcatgcctgccactggagctgacaaagaacgagtcttgtctgaacagccgggagacaagcttcatcacaaacggctcttgcctggccagccggaagacctcctttatgatggccctgtgcctgagctccatctacgaggacctgaagatgtatcaggtggagttcaagacaatgaacgccaagctgctgatggaccccaagcgccagatctttctggatcagaatatgctggccgtgatcgacgagctgatgcaggccctgaactttaatagcgagacagtgccccagaagtctagcctggaggagcctgatttctacaagacaaagatcaagctgtgcatcctgctgcacgccttccggatcagagccgtgaccatcgacagagtgatgtcttatctgaatgccagc

SEQ ID NO: 210907 - DNA, 591 bp, Artificial Sequence
  Description of Artificial Sequence: Synthetic polynucleotide
agaaacctgcctgtcgctacccccgaccccggaatgttcccctgcctgcaccactcccagaacctcctgagggccgtgtccaacatgctgcagaaggctagacagaccctcgaattctacccctgtaccagcgaggagatcgaccatgaggacatcaccaaggataagaccagcaccgtggaggcttgcctgcctctggagctgaccaaaaacgagagctgcctgaacagcagggaaaccagcttcattaccaacggctcctgcctggcctccaggaagacatccttcatgatggccctgtgcctcagcagcatctacgaggacctgaagatgtatcaggtggagtttaagaccatgaatgccaagctgctgatggaccctaagaggcagatcttcctggaccagaatatgctggccgtgattgacgagctgatgcaggccctcaactttaacagcgagaccgtgccccagaaaagcagcctcgaagagcctgacttctacaaaaccaagattaagctgtgtatcctgctgcacgccttcaggatcagggccgtgaccatcgacagggtgatgagctacctgaacgccagc

SEQ ID NO: 210908 - DNA, 591 bp, Artificial Sequence
  Description of Artificial Sequence: Synthetic Construct
cgcaatctgccagtggccacccctgacccaggcatgttcccctgcctgcaccacagccagaacctgctgagggccgtgtccaatatgctgcagaaggcccgccagacactggagttttacccttgtaccagcgaggagatcgaccacgaggatatcacaaaggataagacctccacagtggaggcctgcctgccactggagctgaccaagaacgagtcctgtctgaacagccgggaaaccagcttcatcaccaacggctcctgcctggcctctcgcaagaccagcttcatgatggccctgtgcctgtcctctatctacgaggacctgaagatgtatcaggtggagttcaagaccatgaacgccaagctgctgatggaccctaagcggcagatctttctggatcagaatatgctggccgtgatcgacgagctgatgcaggccctgaacttcaatagcgagacagtgccacagaagagctccctggaggagcccgatttctacaagaccaagatcaagctgtgcatcctgctgcacgcctttcggatcagagccgtgaccatcgacagagtgatgtcctatctgaatgcctct

SEQ ID NO: 210909 - DNA, 591 bp, Artificial Sequence
  Description of Artificial Sequence: Synthetic Construct
agaaacctgcctgtcgctacccccgaccccggaatgttcccctgcctgcaccactcccagaacctcctgagggccgtgtccaacatgctgcagaaggctagacagaccctcgaattctacccctgtaccagcgaggagatcgaccatgaggacatcaccaaggataagaccagcaccgtggaggcttgcctgcctctggagctgaccaaaaacgagagctgcctgaacagcagggaaaccagcttcattaccaacggctcctgcctggcctccaggaagacatccttcatgatggccctgtgcctcagcagcatctacgaggacctgaagatgtatcaggtggagtttaagaccatgaatgccaagctgctgatggaccctaagaggcagatcttcctggaccagaatatgctggccgtgattgacgagctgatgcaggccctcaactttaacagcgagaccgtgccccagaaaagcagcctcgaagagcctgacttctacaaaaccaagattaagctgtgtatcctgctgcacgccttcaggatcagggccgtgaccatcgacagggtgatgagctacctgaacgcctcc

SEQ ID NO: 210910 - DNA, 582 bp, Artificial Sequence
  Description of Artificial Sequence: Synthetic Construct
gtggccactccagacccaggaatgttcccatgccttcaccactcccaaaacctgctgagggccgtcagcaacatgctccagaaggccagacaaactctagaattttacccttgcacttctgaagagattgatcatgaagatatcacaaaagataaaaccagcacagtggaggcctgtttaccattggaattaaccaagaatgagagttgcctaaattccagagagacctctttcataactaatgggagttgcctggcctccagaaagacctcttttatgatggccctgtgccttagtagtatttatgaagacttgaagatgtaccaggtggagttcaagaccatgaatgcaaagcttctgatggatcctaagaggcagatctttctagatcaaaacatgctggcagttattgatgagctgatgcaggccctgaatttcaacagtgagactgtgccacaaaaatcctcccttgaagaaccggatttttataaaactaaaatcaagctctgcatacttcttcatgctttcagaattcgggcagtgactattgatagagtgatgagctatctgaatgcttcctaa

SEQ ID NO: 210911 - DNA, 594 bp, Artificial Sequence
  Description of Artificial Sequence: Synthetic Construct
agaaacctccccgtggccactccagacccaggaatgttcccatgccttcaccactcccaaaacctgctgagggccgtcagcaacatgctccagaaggccagacaaactctagaattttacccttgcacttctgaagagattgatcatgaagatatcacaaaagataaaaccagcacagtggaggcctgtttaccattggaattaaccaagaatgagagttgcctaaattccagagagacctctttcataactaatgggagttgcctggcctccagaaagacctcttttatgatggccctgtgccttagtagtatttatgaagacttgaagatgtaccaggtggagttcaagaccatgaatgcaaagcttctgatggatcctaagaggcagatctttctagatcaaaacatgctggcagttattgatgagctgatgcaggccctgaatttcaacagtgagactgtgccacaaaaatcctcccttgaagaaccggatttttataaaactaaaatcaagctctgcatacttcttcatgctttcagaattcgggcagtgactattgatagagtgatgagctatctgaatgcttcctaa

SEQ ID NO: 210912 - DNA, 594 bp, Artificial Sequence
  Description of Artificial Sequence: Synthetic Construct
cgcaatctgccagtggccacccctgacccaggcatgttcccctgcctgcaccacagccagaacctgctgagggccgtgtccaatatgctgcagaaggcccgccagacactggagttttacccttgtacctctgaggagatcgaccacgaggatatcacaaaggataagaccagcacagtggaggcctgcctgccactggagctgaccaagaacgagtcctgtctgaacagccgggaaaccagcttcatcaccaacggctcctgcctggcctctcgcaagaccagcttcatgatggccctgtgcctgtcctctatctacgaggacctgaagatgtatcaggtggagttcaagaccatgaacgccaagctgctgatggaccctaagcggcagatctttctggatcagaatatgctggccgtgatcgacgagctgatgcaggccctgaacttcaatagcgagacagtgccacagaagagctccctggaggagcccgatttctacaagaccaagatcaagctgtgcatcctgctgcacgcctttcggatcagagccgtgaccatcgacagagtgatgtcctatctgaatgcctcttga

SEQ ID NO: 210913 - DNA, 594 bp, Artificial Sequence
  Description of Artificial Sequence: Synthetic Construct
cgcaatctgccagtggccacccctgacccaggcatgttcccctgcctgcaccacagccagaacctgctgagggccgtgtccaatatgctgcagaaggcccgccagacactggagttttacccttgtaccagcgaggagatcgaccacgaggatatcacaaaggataagacctccacagtggaggcctgcctgccactggagctgaccaagaacgagtcctgtctgaacagccgggaaaccagcttcatcaccaacggctcctgcctggcctctcgcaagaccagcttcatgatggccctgtgcctgtcctctatctacgaggacctgaagatgtatcaggtggagttcaagaccatgaacgccaagctgctgatggaccctaagcggcagatctttctggatcagaatatgctggccgtgatcgacgagctgatgcaggccctgaacttcaatagcgagacagtgccacagaagagctccctggaggagcccgatttctacaagaccaagatcaagctgtgcatcctgctgcacgcctttcggatcagagccgtgaccatcgacagagtgatgtcctatctgaatgcctcttga

SEQ ID NO: 210914 - DNA, 594 bp, Artificial Sequence
  Description of Artificial Sequence: Synthetic Construct
agaaatctgccagtggccacccctgacccaggcatgttcccctgcctgcaccactctcagaacctgctgcgggccgtgagcaatatgctgcagaaggccagacagacactggagttttacccttgtacctccgaggagatcgaccacgaggatatcacaaaggataagacctctacagtggaggcctgcctgccactggagctgaccaagaacgagtcctgtctgaacagccgggaaaccagcttcatcaccaacggctcctgcctggcctctagaaagaccagcttcatgatggccctgtgcctgtcctctatctacgaggacctgaagatgtatcaggtggagttcaagaccatgaacgccaagctgctgatggaccctaagaggcagatctttctggatcagaatatgctggccgtgatcgacgagctgatgcaggccctgaacttcaatagcgagacagtgccacagaagagctccctggaggagcccgatttctacaagaccaagatcaagctgtgcatcctgctgcacgcctttaggatccgcgccgtgaccatcgaccgcgtgatgtcctatctgaatgcctcttga

SEQ ID NO: 210915 - DNA, 594 bp, Artificial Sequence
  Description of Artificial Sequence: Synthetic Construct
agaaacctgcctgtcgctacccccgaccccggaatgttcccctgcctgcaccactcccagaacctcctgagggccgtgtccaacatgctgcagaaggctagacagaccctcgaattctacccctgtaccagcgaggagatcgaccatgaggacatcaccaaggataagaccagcaccgtggaggcttgcctgcctctggagctgaccaaaaacgagagctgcctgaacagcagggaaaccagcttcattaccaacggctcctgcctggcctccaggaagacatccttcatgatggccctgtgcctcagcagcatctacgaggacctgaagatgtatcaggtggagtttaagaccatgaatgccaagctgctgatggaccctaagaggcagatcttcctggaccagaatatgctggccgtgattgacgagctgatgcaggccctcaactttaacagcgagaccgtgccccagaaaagcagcctcgaagagcctgacttctacaaaaccaagattaagctgtgtatcctgctgcacgccttcaggatcagggccgtgaccatcgacagggtgatgagctacctgaacgccagctaa

SEQ ID NO: 210916 - DNA, 597 bp, Artificial Sequence
  Description of Artificial Sequence: Synthetic Construct
agaaatctgccagtggccacccctgacccaggcatgttcccctgcctgcaccacagccagaacctgctgagggccgtgtccaatatgctgcagaaggcccgccagacactggagttttacccctgtaccagcgaggagatcgaccacgaggatatcacaaaggataagacctccacagtggaggcctgcctgcctctggagctgaccaagaacgagtcttgtctgaatagcagggagacatccttcatcaccaacggctcttgcctggccagccgcaagacatcctttatgatggccctgtgcctgtcctctatctacgaggacctgaagatgtatcaggtggagttcaagaccatgaacgccaagctgctgatggaccctaagaggcagatctttctggatcagaatatgctggccgtgatcgacgagctgatgcaggccctgaacttcaattccgagacagtgcctcagaagagctccctggaggagccagatttctacaagaccaagatcaagctgtgcatcctgctgcacgcctttcggatcagagccgtgaccatcgaccgcgtgatgtcttatctgaatgccagcggatcc

SEQ ID NO: 210917 - DNA, 597 bp, Artificial Sequence
  Description of Artificial Sequence: Synthetic Construct
cggaatctgcctgtggcaacccccgaccctggaatgttcccatgcctgcaccacagccagaacctgctgcgcgccgtgtccaatatgctgcagaaggcccggcagaccctggagttttacccatgtacaagcgaggagatcgaccacgaggatatcaccaaggataagacatccaccgtggaggcatgcctgccactggagctgacaaagaacgagtcttgtctgaacagccgggagacaagcttcatcacaaacggctcttgcctggccagccggaagacctcctttatgatggccctgtgcctgagctccatctacgaggacctgaagatgtatcaggtggagttcaagacaatgaacgccaagctgctgatggaccccaagcgccagatctttctggatcagaatatgctggccgtgatcgacgagctgatgcaggccctgaactttaatagcgagacagtgccccagaagtctagcctggaggagcctgatttctacaagacaaagatcaagctgtgcatcctgctgcacgccttccggatcagagccgtgaccatcgacagagtgatgtcttatctgaatgccagcggatcc

SEQ ID NO: 210918 - DNA, 593 bp, Artificial Sequence
  Description of Artificial Sequence: Synthetic polynucleotide
cgcaatctgccagtggccacccctgacccaggcatgttcccctgcctgcaccacagccagaacctgctgagggccgtgtccaatatgctgcagaaggcccgccagacactggagttttacccttgtaccagcgaggagatcgaccacgaggatatcacaaaggataagacctccacagtggaggcctgcctgccactggagctgaccaagaacgagtcctgtctgaacagccgggaaaccagcttcatcaccaacggctcctgcctggcctctcgcaagaccagcttcatgatggccctgtgcctgtcctctatctacgaggacctgaagatgtatcaggtggagttcaagaccatgaacgccaagctgctgatggaccctaagcggcagatctttctggatcagaatatgctggccgtgatcgacgagctgatgcaggccctgaacttcaatagcgagacagtgccacagaagagctccctggaggagcccgatttctacaagaccaagatcaagctgtgcatcctgctgcacgcctttcggatcagagccgtgaccatcgacagagtgatgtcctatctgaatgcctcttg

SEQ ID NO: 210919 - protein, 193 aa, Homo sapiens
VATPDPGMFPCLHHSQNLLRAVSNMLQKARQTLEFYPCTSEEIDHEDITKDKTSTVEACLPLELTKNESCLNSRETSFITNGSCLASRKTSFMMALCLSSIYEDLKMYQVEFKTMNAKLLMDPKRQIFLDQNMLAVIDELMQALNFNSETVPQKSSLEEPDFYKTKIKLCILLHAFRIRAVTIDRVMSYLNAS

SEQ ID NO: 210920 - DNA, 783 bp, Artificial Sequence
  Description of Artificial Sequence: Synthetic Construct
atgatcgaaacatacaaccaaacttctccccgatctgcggccactggactgcccatcagcatgaaaatttttatgtatttacttactgtttttcttatcacccagatgattgggtcagcactttttgctgtgtatcttcatagaaggttggacaagatagaagatgaaaggaatcttcatgaagattttgtattcatgaaaacgatacagagatgcaacacaggagaaagatccttatccttactgaactgtgaggagattaaaagccagtttgaaggctttgtgaaggatataatgttaaacaaagaggagacgaagaaagaaaacagctttgaaatgcaaaaaggtgatcagaatcctcaaattgcggcacatgtcataagtgaggccagcagtaaaacaacatctgtgttacagtgggctgaaaaaggatactacaccatgagcaacaacttggtaaccctggaaaatgggaaacagctgaccgttaaaagacaaggactctattatatctatgcccaagtcaccttctgttccaatcgggaagcttcgagtcaagctccatttatagccagcctctgcctaaagtcccccggtagattcgagagaatcttactcagagctgcaaatacccacagttccgccaaaccttgcgggcaacaatccattcacttgggaggagtatttgaattgcaaccaggtgcttcggtgtttgtcaatgtgactgatccaagccaagtgagccatggcactggcttcacgtcctttggcttactcaaactc

SEQ ID NO: 210921 - protein, 149 aa, Artificial Sequence
  Description of Artificial Sequence: Synthetic Construct
MQKGDQNPQIAAHVISEASSKTTSVLQWAEKGYYTMSNNLVTLENGKQLTVKRQGLYYIYAQVTFCSNREASSQAPFIASLCLKSPGRFERILLRAANTHSSAKPCGQQSIHLGGVFELQPGASVFVNVTDPSQVSHGTGFTSFGLLKL

SEQ ID NO: 210922 - DNA, 447 bp, Artificial Sequence
  Description of Artificial Sequence: Synthetic Construct
atgcaaaaaggtgatcagaatcctcaaattgcggcacatgtcataagtgaggccagcagtaaaacaacatctgtgttacagtgggctgaaaaaggatactacaccatgagcaacaacttggtaaccctggaaaatgggaaacagctgaccgttaaaagacaaggactctattatatctatgcccaagtcaccttctgttccaatcgggaagcttcgagtcaagctccatttatagccagcctctgcctaaagtcccccggtagattcgagagaatcttactcagagctgcaaatacccacagttccgccaaaccttgcgggcaacaatccattcacttgggaggagtatttgaattgcaaccaggtgcttcggtgtttgtcaatgtgactgatccaagccaagtgagccatggcactggcttcacgtcctttggcttactcaaactc

SEQ ID NO: 210923 - protein, 248 aa, Artificial Sequence
  Description of Artificial Sequence: Synthetic Construct
ATGLPISMKIFMYLLTVFLITQMIGSALFAVYLHRRLDKIEDERNLHEDFVFMKTIQRCNTGERSLSLLNCEEIKSQFEGFVKDIMLNKEETKKENSFEMQKGDQNPQIAAHVISEASSKTTSVLQWAEKGYYTMSNNLVTLENGKQLTVKRQGLYYIYAQVTFCSNREASSQAPFIASLCLKSPGRFERILLRAANTHSSAKPCGQQSIHLGGVFELQPGASVFVNVTDPSQVSHGTGFTSFGLLKL

SEQ ID NO: 210924 - DNA, 744 bp, Artificial Sequence
  Description of Artificial Sequence: Synthetic Construct
gccactggactgcccatcagcatgaaaatttttatgtatttacttactgtttttcttatcacccagatgattgggtcagcactttttgctgtgtatcttcatagaaggttggacaagatagaagatgaaaggaatcttcatgaagattttgtattcatgaaaacgatacagagatgcaacacaggagaaagatccttatccttactgaactgtgaggagattaaaagccagtttgaaggctttgtgaaggatataatgttaaacaaagaggagacgaagaaagaaaacagctttgaaatgcaaaaaggtgatcagaatcctcaaattgcggcacatgtcataagtgaggccagcagtaaaacaacatctgtgttacagtgggctgaaaaaggatactacaccatgagcaacaacttggtaaccctggaaaatgggaaacagctgaccgttaaaagacaaggactctattatatctatgcccaagtcaccttctgttccaatcgggaagcttcgagtcaagctccatttatagccagcctctgcctaaagtcccccggtagattcgagagaatcttactcagagctgcaaatacccacagttccgccaaaccttgcgggcaacaatccattcacttgggaggagtatttgaattgcaaccaggtgcttcggtgtttgtcaatgtgactgatccaagccaagtgagccatggcactggcttcacgtcctttggcttactcaaactc

SEQ ID NO: 210925 - protein, 254 aa, Artificial Sequence
  Description of Artificial Sequence: Synthetic Construct
MIETYNQTSPRSAATGLPISMKIFMYLLTVFLITQMIGSALFAVYLHRRLDKIEDERNLHEDFVFMKTIQRCNTGERSLSLLNCEEIKSQFEGFVKDIMLNKEETKKENDQNPQIAAHVISEASSKTTSVLQWAEKGYYTMSNNLVTLENGKQLTVKRQGLYYIYAQVTFCSNREASSQAPFIASLCLKSPGRFERILLRAANTHSSAKPCGQQSIHLGGVFELQPGASVFVNVTDPSQVSHGTGFTSFGLLKL

SEQ ID NO: 210926 - DNA, 762 bp, Artificial Sequence
  Description of Artificial Sequence: Synthetic Construct
atgatcgaaacatacaaccaaacttctccccgatctgcggccactggactgcccatcagcatgaaaatttttatgtatttacttactgtttttcttatcacccagatgattgggtcagcactttttgctgtgtatcttcatagaaggttggacaagatagaagatgaaaggaatcttcatgaagattttgtattcatgaaaacgatacagagatgcaacacaggagaaagatccttatccttactgaactgtgaggagattaaaagccagtttgaaggctttgtgaaggatataatgttaaacaaagaggagacgaagaaagaaaacgatcagaatcctcaaattgcggcacatgtcataagtgaggccagcagtaaaacaacatctgtgttacagtgggctgaaaaaggatactacaccatgagcaacaacttggtaaccctggaaaatgggaaacagctgaccgttaaaagacaaggactctattatatctatgcccaagtcaccttctgttccaatcgggaagcttcgagtcaagctccatttatagccagcctctgcctaaagtcccccggtagattcgagagaatcttactcagagctgcaaatacccacagttccgccaaaccttgcgggcaacaatccattcacttgggaggagtatttgaattgcaaccaggtgcttcggtgtttgtcaatgtgactgatccaagccaagtgagccatggcactggcttcacgtcctttggcttactcaaactc

SEQ ID NO: 210927 - protein, 533 aa, Artificial Sequence
  Description of Artificial Sequence: Synthetic Construct
MSHHWGYGKHNGPEHWHKDFPIAKGERQSPVDIDTHTAKYDPSLKPLSVSYDQATSLRILNNGHAFNVEFDDSQDKAVLKGGPLDGTYRLIQFHFHWGSLDGQGSEHTVDKKKYAAELHLVHWNTKYGDFGKAVQQPDGLAVLGIFLKVGSAKPGHQKVVDVLDSIKTKGKSADFTNFDPRGLLPESLDYWTYPGSLTTPPLLECVTWIVLKEPISVSSEQVLKFRKLNFNGEGEPEELMVDNWRPAQPLKNRQIKASFKGGSGGGSGGGSGMIETYNQTSPRSAATGLPISMKIFMYLLTVFLITQMIGSALFAVYLHRRLDKIEDERNLHEDFVFMKTIQRCNTGERSLSLLNCEEIKSQFEGFVKDIMLNKEETKKENSFEMQKGDQNPQIAAHVISEASSKTTSVLQWAEKGYYTMSNNLVTLENGKQLTVKRQGLYYIYAQVTFCSNREASSQAPFIASLCLKSPGRFERILLRAANTHSSAKPCGQQSIHLGGVFELQPGASVFVNVTDPSQVSHGTGFTSFGLLKL

SEQ ID NO: 210928 - DNA, 1602 bp, Artificial Sequence
  Description of Artificial Sequence: Synthetic Construct
atgtcccatcactgggggtacggcaaacacaacggacctgagcactggcataaggacttccccattgccaagggagagcgccagtcccctgttgacatcgacactcatacagccaagtatgacccttccctgaagcccctgtctgtttcctatgatcaagcaacttccctgagaatcctcaacaatggtcatgctttcaacgtggagtttgatgactctcaggacaaagcagtgctcaagggaggacccctggatggcacttacagattgattcagtttcactttcactggggttcacttgatggacaaggttcagagcatactgtggataaaaagaaatatgctgcagaacttcacttggttcactggaacaccaaatatggggattttgggaaagctgtgcagcaacctgatggactggccgttctaggtatttttttgaaggttggcagcgctaaaccgggccatcagaaagttgttgatgtgctggattccattaaaacaaagggcaagagtgctgacttcactaacttcgatcctcgtggcctccttcctgaatccctggattactggacctacccaggctcactgaccacccctcctcttctggaatgtgtgacctggattgtgctcaaggaacccatcagcgtcagcagcgagcaggtgttgaaattccgtaaacttaacttcaatggggagggtgaacccgaagaactgatggtggacaactggcgcccagctcagccactgaagaacaggcaaatcaaagcttccttcaaaggaggatccggaggtggaagtggaggtggatctggtatgatcgaaacatacaaccaaacttctccccgatctgcggccactggactgcccatcagcatgaaaatttttatgtatttacttactgtttttcttatcacccagatgattgggtcagcactttttgctgtgtatcttcatagaaggttggacaagatagaagatgaaaggaatcttcatgaagattttgtattcatgaaaacgatacagagatgcaacacaggagaaagatccttatccttactgaactgtgaggagattaaaagccagtttgaaggctttgtgaaggatataatgttaaacaaagaggagacgaagaaagaaaacagctttgaaatgcaaaaaggtgatcagaatcctcaaattgcggcacatgtcataagtgaggccagcagtaaaacaacatctgtgttacagtgggctgaaaaaggatactacaccatgagcaacaacttggtaaccctggaaaatgggaaacagctgaccgttaaaagacaaggactctattatatctatgcccaagtcaccttctgttccaatcgggaagcttcgagtcaagctccatttatagccagcctctgcctaaagtcccccggtagattcgagagaatcttactcagagctgcaaatacccacagttccgccaaaccttgcgggcaacaatccattcacttgggaggagtatttgaattgcaaccaggtgcttcggtgtttgtcaatgtgactgatccaagccaagtgagccatggcactggcttcacgtcctttggcttactcaaactctga

SEQ ID NO: 210929-210948 - skipped (20 entries)

SEQ ID NO: 210949 - protein, 1407 aa, Artificial Sequence
  Description of Artificial Sequence: Synthetic Construct
MALPVTALLLPLALLLHAARPDIQMTQTTSSLSASLGDRVTISCRASQDISKYLNWYQQKPDGTVKLLIYHTSRLHSGVPSRFSGSGSGTDYSLTISNLEQEDIATYFCQQGNTLPYTFGGGTKLEITGGGGSGGGGSGGGGSEVKLQESGPGLVAPSQSLSVTCTVSGVSLPDYGVSWIRQPPRKGLEWLGVIWGSETTYYNSALKSRLTIIKDNSKSQVFLKMNSLQTDDTAIYYCAKHYYYGGSYAMDYWGQGTSVTVSSTTTPAPRPPTPAPTIASQPLSLRPEACRPAAGGAVHTRGLDFACDIYIWAPLAGTCGVLLLSLVITLYCKRGRKKLLYIFKQPFMRPVQTTQEEDGCSCRFPEEEEGGCELRVKFSRSADAPAYKQGQNQLYNELNLGRREEYDVLDKRRGRDPEMGGKPRRKNPQEGLYNELQKDKMAEAYSEIGMKGERRRGKGHDGLYQGLSTATKDTYDALHMQALPPRGSATNFSLLKQAGDVEENPGPMCHQQLVISWFSLVFLASPLVAIWELKKDVYVVELDWYPDAPGEMVVLTCDTPEEDGITWTLDQSSEVLGSGKTLTIQVKEFGDAGQYTCHKGGEVLSHSLLLLHKKEDGIWSTDILKDQKEPKNKTFLRCEAKNYSGRFTCWWLTTISTDLTFSVKSSRGSSDPQGVTCGAATLSAERVRGDNKEYEYSVECQEDSACPAAEESLPIEVMVDAVHKLKYENYTSSFFIRDIIKPDPPKNLQLKPLKNSRQVEVSWEYPDTWSTPHSYFSLTFCVQVQGKSKREKKDRVFTDKTSATVICRKNASISVRAQDRYYSSSWSEWASVPCSGGGGSGGGGSGGGGSRNLPVATPDPGMFPCLHHSQNLLRAVSNMLQKARQTLEFYPCTSEEIDHEDITKDKTSTVEACLPLELTKNESCLNSRETSFITNGSCLASRKTSFMMALCLSSIYEDLKMYQVEFKTMNAKLLMDPKRQIFLDQNMLAVIDELMQALNFNSETVPQKSSLEEPDFYKTKIKLCILLHAFRIRAVTIDRVMSYLNASGSGSGSGSGSGSGSGSGSGSGSGSGSGSGSTTTPAPRPPTPAPTIASQPLSLRPEACRPAAGGAVHTRGLDFACDIYIWAPLAGTCGVLLLSLVITLYCGSSHHWGYGKHNGPEHWHKDFPIAKGERQSPVDIDTHTAKYDPSLKPLSVSYDQATSLRNLNNGHAFNVEFDDSQDKAVLKGGPLDGTYRLIQFHFHWGSLDRQGSEHTVDKKKYAAELHLVHWNTKYGDFGKAVQQPDGLAVLGIFLKVGSAKPGLQKVVDVLDSIKTKGKSADFTNFDPRGLLPESLDYWTYPGSLTTPPLLECVTWIVLKEPISVSSEQVLKFRKLNFNGEGEPEELMVDNWRPAQPLKNRQIKASFK

SEQ ID NO: 210950 - DNA, 4224 bp, Artificial Sequence
  Description of Artificial Sequence: Synthetic Construct
atggccttaccagtgaccgccttgctcctgccgctggccttgctgctccacgccgccaggccggacatccagatgacacagactacatcctccctgtctgcctctctgggagacagagtcaccatcagttgcagggcaagtcaggacattagtaaatatttaaattggtatcagcagaaaccagatggaactgttaaactcctgatctaccatacatcaagattacactcaggagtcccatcaaggttcagtggcagtgggtctggaacagattattctctcaccattagcaacctggagcaagaagatattgccacttacttttgccaacagggtaatacgcttccgtacacgttcggaggggggaccaagctggagatcacaggtggcggtggctcgggcggtggtgggtcgggtggcggcggatctgaggtgaaactgcaggagtcaggacctggcctggtggcgccctcacagagcctgtccgtcacatgcactgtctcaggggtctcattacccgactatggtgtaagctggattcgccagcctccacgaaagggtctggagtggctgggagtaatatggggtagtgaaaccacatactataattcagctctcaaatccagactgaccatcatcaaggacaactccaagagccaagttttcttaaaaatgaacagtctgcaaactgatgacacagccatttactactgtgccaaacattattactacggtggtagctatgctatggactactggggccaaggaacctcagtcaccgtctcctcaaccacgacgccagcgccgcgaccaccaacaccggcgcccaccatcgcgtcgcagcccctgtccctgcgcccagaggcgtgccggccagcggcggggggcgcagtgcacacgagggggctggacttcgcctgtgatatctacatctgggcgcccttggccgggacttgtggggtccttctcctgtcactggttatcaccctttactgcaaacggggcagaaagaaactcctgtatatattcaaacaaccatttatgagaccagtacaaactactcaagaggaagatggctgtagctgccgatttccagaagaagaagaaggaggatgtgaactgagagtgaagttcagcaggagcgcagacgcccccgcgtacaagcagggccagaaccagctctataacgagctcaatctaggacgaagagaggagtacgatgttttggacaagagacgtggccgggaccctgagatggggggaaagccgagaaggaagaaccctcaggaaggcctgtacaatgaactgcagaaagataagatggcggaggcctacagtgagattgggatgaaaggcgagcgccggaggggcaaggggcacgatggcctttaccagggtctcagtacagccaccaaggacacctacgacgcccttcacatgcaggccctgccccctcgcggatcagctactaacttcagcctgctgaagcaggctggagacgtggaggagaaccctggacctatgtgccaccaacagctcgtgatcagctggttctccctggtgttcctggctagccccctggtggccatctgggagctcaagaaagacgtgtacgtggtggaactggactggtaccccgacgcccctggcgaaatggtggtgctgacatgcgacacccctgaggaggatggcattacctggaccctcgatcagagctccgaggtgctgggcagcggcaaaaccctgaccatccaggtgaaggagtttggcgatgccggccagtacacatgtcacaagggcggcgaggtgctgagccactccctgctgctgctccacaagaaggaagatggcatctggagcaccgacattctgaaggatcagaaggagcccaagaacaagacattcctgaggtgtgaggccaagaactacagcggcaggtttacctgctggtggctgacaacaatcagcaccgacctcacattctccgtcaagtcctccaggggttcttccgaccctcaaggcgtgacatgcggcgctgccaccctgagcgctgagagagtcaggggcgacaacaaggagtacgagtacagcgtcgaatgtcaggaggacagcgcctgtcccgccgctgaagagagcctgcctatcgaggtgatggtggacgccgtgcacaaactgaagtatgagaattacacctccagcttcttcatcagggacatcatcaaacccgatccccccaagaacctgcagctgaagcctctgaagaacagcagacaggtcgaagtgtcctgggagtaccctgatacctggtccacaccccacagctacttcagcctgaccttttgcgtgcaggtgcagggcaagagcaaaagggagaagaaggacagggtgtttaccgacaagacctccgccacagtgatttgcagaaagaacgcctccatcagcgtgagggcccaggacaggtattacagcagctcctggagcgaatgggctagcgtgccctgtagcggaggaggaggcagcggaggaggaggttctggaggaggcggcagcagaaacctgcctgtcgctacccccgaccccggaatgttcccctgcctgcaccactcccagaacctcctgagggccgtgtccaacatgctgcagaaggctagacagaccctcgaattctacccctgtaccagcgaggagatcgaccatgaggacatcaccaaggataagaccagcaccgtggaggcttgcctgcctctggagctgaccaaaaacgagagctgcctgaacagcagggaaaccagcttcattaccaacggctcctgcctggcctccaggaagacatccttcatgatggccctgtgcctcagcagcatctacgaggacctgaagatgtatcaggtggagtttaagaccatgaatgccaagctgctgatggaccctaagaggcagatcttcctggaccagaatatgctggccgtgattgacgagctgatgcaggccctcaactttaacagcgagaccgtgccccagaaaagcagcctcgaagagcctgacttctacaaaaccaagattaagctgtgtatcctgctgcacgccttcaggatcagggccgtgaccatcgacagggtgatgagctacctgaacgccagcggatctggttctggttccggaagtggatctggttcagggtccggtagtggatctgggtcaggaagtggaagcggtagtgggtctggatctaccacaaccccagcacctcgcccaccaacaccagcaccaaccatcgcatcccagccactgtctctgaggcccgaggcatgtaggcctgcagcaggaggcgccgtgcacaccaggggcctggactttgcctgcgatatctatatctgggcaccactggcaggaacatgtggcgtgctgctgctgtccctggtcatcaccctgtattgcggatcctcccatcactgggggtacggcaaacacaacggacctgagcactggcataaggacttccccattgccaagggagagcgccagtcccctgttgacatcgacactcatacagccaagtatgacccttccctgaagcccctgtctgtttcctatgatcaagcaacttccctgagaaacctcaacaatggtcatgctttcaacgtggagtttgatgactctcaggacaaagcagtgctcaagggaggacccctggatggcacttacagattgattcagtttcactttcactggggttcacttgatcgacaaggttcagagcatactgtggataaaaagaaatatgctgcagaacttcacttggttcactggaacaccaaatatggggattttgggaaagctgtgcagcaacctgatggactggccgttctaggtatttttttgaaggttggcagcgctaaaccgggccttcagaaagttgttgatgtgctggattccattaaaacaaagggcaagagtgctgacttcactaacttcgatcctcgtggcctccttcctgaatccctggattactggacctacccaggctcactgaccacccctcctcttctggaatgtgtgacctggattgtgctcaaggaacccatcagcgtcagcagcgagcaggtgttgaaattccgtaaacttaacttcaatggggagggtgaacccgaagaactgatggtggacaactggcgcccagctcagccactgaagaacaggcaaatcaaagcttccttcaaatga

SEQ ID NO: 210951 - protein, 1407 aa, Artificial Sequence
  Description of Artificial Sequence: Synthetic Construct
MALPVTALLLPLALLLHAARPDIQMTQTTSSLSASLGDRVTISCRASQDISKYLNWYQQKPDGTVKLLIYHTSRLHSGVPSRFSGSGSGTDYSLTISNLEQEDIATYFCQQGNTLPYTFGGGTKLEITGGGGSGGGGSGGGGSEVKLQESGPGLVAPSQSLSVTCTVSGVSLPDYGVSWIRQPPRKGLEWLGVIWGSETTYYNSALKSRLTIIKDNSKSQVFLKMNSLQTDDTAIYYCAKHYYYGGSYAMDYWGQGTSVTVSSTTTPAPRPPTPAPTIASQPLSLRPEACRPAAGGAVHTRGLDFACDIYIWAPLAGTCGVLLLSLVITLYCKRGRKKLLYIFKQPFMRPVQTTQEEDGCSCRFPEEEEGGCELRVKFSRSADAPAYKQGQNQLYNELNLGRREEYDVLDKRRGRDPEMGGKPRRKNPQEGLYNELQKDKMAEAYSEIGMKGERRRGKGHDGLYQGLSTATKDTYDALHMQALPPRGSATNFSLLKQAGDVEENPGPMCHQQLVISWFSLVFLASPLVAIWELKKDVYVVELDWYPDAPGEMVVLTCDTPEEDGITWTLDQSSEVLGSGKTLTIQVKEFGDAGQYTCHKGGEVLSHSLLLLHKKEDGIWSTDILKDQKEPKNKTFLRCEAKNYSGRFTCWWLTTISTDLTFSVKSSRGSSDPQGVTCGAATLSAERVRGDNKEYEYSVECQEDSACPAAEESLPIEVMVDAVHKLKYENYTSSFFIRDIIKPDPPKNLQLKPLKNSRQVEVSWEYPDTWSTPHSYFSLTFCVQVQGKSKREKKDRVFTDKTSATVICRKNASISVRAQDRYYSSSWSEWASVPCSGGGGSGGGGSGGGGSRNLPVATPDPGMFPCLHHSQNLLRAVSNMLQKARQTLEFYPCTSEEIDHEDITKDKTSTVEACLPLELTKNESCLNSRETSFITNGSCLASRKTSFMMALCLSSIYEDLKMYQVEFKTMNAKLLMDPKRQIFLDQNMLAVIDELMQALNFNSETVPQKSSLEEPDFYKTKIKLCILLHAFRIRAVTIDRVMSYLNASGSGSGSGSGSGSGSGSGSGSGSGSGSGSGSTTTPAPRPPTPAPTIASQPLSLRPEACRPAAGGAVHTRGLDFACDIYIWAPLAGTCGVLLLSLVITLYCGSSHHWGYGKHNGPEHWHKDFPIAKGERQSPVDIDTHTAKYDPSLKPLSVSYDQATSLRILNNGHAFNVEFDDSQDKAVLKGGPLDGTYRLIQFHFHWGSLDGQGSEHTVDKKKYAAELHLVHWNTKYGDFGKAVQQPDGLAVLGIFLKVGSAKPGHQKVVDVLDSIKTKGKSADFTNFDPRGLLPESLDYWTYPGSLTTPPLLECVTWIVLKEPISVSSEQVLKFRKLNFNGEGEPEELMVDNWRPAQPLKNRQIKASFK

SEQ ID NO: 210952 - DNA, 4224 bp, Artificial Sequence
  Description of Artificial Sequence: Synthetic Construct
atggccttaccagtgaccgccttgctcctgccgctggccttgctgctccacgccgccaggccggacatccagatgacacagactacatcctccctgtctgcctctctgggagacagagtcaccatcagttgcagggcaagtcaggacattagtaaatatttaaattggtatcagcagaaaccagatggaactgttaaactcctgatctaccatacatcaagattacactcaggagtcccatcaaggttcagtggcagtgggtctggaacagattattctctcaccattagcaacctggagcaagaagatattgccacttacttttgccaacagggtaatacgcttccgtacacgttcggaggggggaccaagctggagatcacaggtggcggtggctcgggcggtggtgggtcgggtggcggcggatctgaggtgaaactgcaggagtcaggacctggcctggtggcgccctcacagagcctgtccgtcacatgcactgtctcaggggtctcattacccgactatggtgtaagctggattcgccagcctccacgaaagggtctggagtggctgggagtaatatggggtagtgaaaccacatactataattcagctctcaaatccagactgaccatcatcaaggacaactccaagagccaagttttcttaaaaatgaacagtctgcaaactgatgacacagccatttactactgtgccaaacattattactacggtggtagctatgctatggactactggggccaaggaacctcagtcaccgtctcctcaaccacgacgccagcgccgcgaccaccaacaccggcgcccaccatcgcgtcgcagcccctgtccctgcgcccagaggcgtgccggccagcggcggggggcgcagtgcacacgagggggctggacttcgcctgtgatatctacatctgggcgcccttggccgggacttgtggggtccttctcctgtcactggttatcaccctttactgcaaacggggcagaaagaaactcctgtatatattcaaacaaccatttatgagaccagtacaaactactcaagaggaagatggctgtagctgccgatttccagaagaagaagaaggaggatgtgaactgagagtgaagttcagcaggagcgcagacgcccccgcgtacaagcagggccagaaccagctctataacgagctcaatctaggacgaagagaggagtacgatgttttggacaagagacgtggccgggaccctgagatggggggaaagccgagaaggaagaaccctcaggaaggcctgtacaatgaactgcagaaagataagatggcggaggcctacagtgagattgggatgaaaggcgagcgccggaggggcaaggggcacgatggcctttaccagggtctcagtacagccaccaaggacacctacgacgcccttcacatgcaggccctgccccctcgcggatcagctactaacttcagcctgctgaagcaggctggagacgtggaggagaaccctggacctatgtgccaccaacagctcgtgatcagctggttctccctggtgttcctggctagccccctggtggccatctgggagctcaagaaagacgtgtacgtggtggaactggactggtaccccgacgcccctggcgaaatggtggtgctgacatgcgacacccctgaggaggatggcattacctggaccctcgatcagagctccgaggtgctgggcagcggcaaaaccctgaccatccaggtgaaggagtttggcgatgccggccagtacacatgtcacaagggcggcgaggtgctgagccactccctgctgctgctccacaagaaggaagatggcatctggagcaccgacattctgaaggatcagaaggagcccaagaacaagacattcctgaggtgtgaggccaagaactacagcggcaggtttacctgctggtggctgacaacaatcagcaccgacctcacattctccgtcaagtcctccaggggttcttccgaccctcaaggcgtgacatgcggcgctgccaccctgagcgctgagagagtcaggggcgacaacaaggagtacgagtacagcgtcgaatgtcaggaggacagcgcctgtcccgccgctgaagagagcctgcctatcgaggtgatggtggacgccgtgcacaaactgaagtatgagaattacacctccagcttcttcatcagggacatcatcaaacccgatccccccaagaacctgcagctgaagcctctgaagaacagcagacaggtcgaagtgtcctgggagtaccctgatacctggtccacaccccacagctacttcagcctgaccttttgcgtgcaggtgcagggcaagagcaaaagggagaagaaggacagggtgtttaccgacaagacctccgccacagtgatttgcagaaagaacgcctccatcagcgtgagggcccaggacaggtattacagcagctcctggagcgaatgggctagcgtgccctgtagcggaggaggaggcagcggaggaggaggttctggaggaggcggcagcagaaacctgcctgtcgctacccccgaccccggaatgttcccctgcctgcaccactcccagaacctcctgagggccgtgtccaacatgctgcagaaggctagacagaccctcgaattctacccctgtaccagcgaggagatcgaccatgaggacatcaccaaggataagaccagcaccgtggaggcttgcctgcctctggagctgaccaaaaacgagagctgcctgaacagcagggaaaccagcttcattaccaacggctcctgcctggcctccaggaagacatccttcatgatggccctgtgcctcagcagcatctacgaggacctgaagatgtatcaggtggagtttaagaccatgaatgccaagctgctgatggaccctaagaggcagatcttcctggaccagaatatgctggccgtgattgacgagctgatgcaggccctcaactttaacagcgagaccgtgccccagaaaagcagcctcgaagagcctgacttctacaaaaccaagattaagctgtgtatcctgctgcacgccttcaggatcagggccgtgaccatcgacagggtgatgagctacctgaacgccagcggatctggttctggttccggaagtggatctggttcagggtccggtagtggatctgggtcaggaagtggaagcggtagtgggtctggatctaccacaaccccagcacctcgcccaccaacaccagcaccaaccatcgcatcccagccactgtctctgaggcccgaggcatgtaggcctgcagcaggaggcgccgtgcacaccaggggcctggactttgcctgcgatatctatatctgggcaccactggcaggaacatgtggcgtgctgctgctgtccctggtcatcaccctgtattgcggatcctcccatcactgggggtacggcaaacacaacggacctgagcactggcataaggacttccccattgccaagggagagcgccagtcccctgttgacatcgacactcatacagccaagtatgacccttccctgaagcccctgtctgtttcctatgatcaagcaacttccctgagaatcctcaacaatggtcatgctttcaacgtggagtttgatgactctcaggacaaagcagtgctcaagggaggacccctggatggcacttacagattgattcagtttcactttcactggggttcacttgatggacaaggttcagagcatactgtggataaaaagaaatatgctgcagaacttcacttggttcactggaacaccaaatatggggattttgggaaagctgtgcagcaacctgatggactggccgttctaggtatttttttgaaggttggcagcgctaaaccgggccatcagaaagttgttgatgtgctggattccattaaaacaaagggcaagagtgctgacttcactaacttcgatcctcgtggcctccttcctgaatccctggattactggacctacccaggctcactgaccacccctcctcttctggaatgtgtgacctggattgtgctcaaggaacccatcagcgtcagcagcgagcaggtgttgaaattccgtaaacttaacttcaatggggagggtgaacccgaagaactgatggtggacaactggcgcccagctcagccactgaagaacaggcaaatcaaagcttccttcaaatga

SEQ ID NO: 210953 - protein, 1407 aa, Artificial Sequence; identical to SEQ ID NO: 210951
  Description of Artificial Sequence: Synthetic Construct

SEQ ID NO: 210954 - DNA, 4224 bp, Artificial Sequence; identical to SEQ ID NO: 210952
  Description of Artificial Sequence: Synthetic Construct

SEQ ID NO: 210955 - protein, 1407 aa, Artificial Sequence
  Description of Artificial Sequence: Synthetic Construct
MALPVTALLLPLALLLHAARPDIQMTQTTSSLSASLGDRVTISCRASQDISKYLNWYQQKPDGTVKLLIYHTSRLHSGVPSRFSGSGSGTDYSLTISNLEQEDIATYFCQQGNTLPYTFGGGTKLEITGGGGSGGGGSGGGGSEVKLQESGPGLVAPSQSLSVTCTVSGVSLPDYGVSWIRQPPRKGLEWLGVIWGSETTYYNSALKSRLTIIKDNSKSQVFLKMNSLQTDDTAIYYCAKHYYYGGSYAMDYWGQGTSVTVSSTTTPAPRPPTPAPTIASQPLSLRPEACRPAAGGAVHTRGLDFACDIYIWAPLAGTCGVLLLSLVITLYCKRGRKKLLYIFKQPFMRPVQTTQEEDGCSCRFPEEEEGGCELRVKFSRSADAPAYKQGQNQLYNELNLGRREEYDVLDKRRGRDPEMGGKPRRKNPQEGLYNELQKDKMAEAYSEIGMKGERRRGKGHDGLYQGLSTATKDTYDALHMQALPPRGSATNFSLLKQAGDVEENPGPMCHQQLVISWFSLVFLASPLVAIWELKKDVYVVELDWYPDAPGEMVVLTCDTPEEDGITWTLDQSSEVLGSGKTLTIQVKEFGDAGQYTCHKGGEVLSHSLLLLHKKEDGIWSTDILKDQKEPKNKTFLRCEAKNYSGRFTCWWLTTISTDLTFSVKSSRGSSDPQGVTCGAATLSAERVRGDNKEYEYSVECQEDSACPAAEESLPIEVMVDAVHKLKYENYTSSFFIRDIIKPDPPKNLQLKPLKNSRQVEVSWEYPDTWSTPHSYFSLTFCVQVQGKSKREKKDRVFTDKTSATVICRKNASISVRAQDRYYSSSWSEWASVPCSGGGGSGGGGSGGGGSRNLPVATPDPGMFPCLHHSQNLLRAVSNMLQKARQTLEFYPCTSEEIDHEDITKDKTSTVEACLPLELTKNESCLNSRETSFITNGSCLASRKTSFMMALCLSSIYEDLKMYQVEFKTMNAKLLMDPKRQIFLDQNMLAVIDELMQALNFNSETVPQKSSLEEPDFYKTKIKLCILLHAFRIRAVTIDRVMSYLNASGSGSGSGSGSGSGSGSGSGSGSGSGSGSGSTTTPAPRPPTPAPTIASQPLSLRPEACRPAAGGAVHTRGLDFACDIYIWAPLAGTCGVLLLSLVITLYCGSSHHWGYGKHNGPEHWHKDFPIAKGERQSPVDIDTHTAKYDPSLKPLSVSYDQATSLRILNNDHAFNVVFDDSQDKAVLKGGPLDGTYRLIQFHFHWGSLDGQGSEHTVDKKKYAAELHLVHWNTKYGDFGKAVQQPDGLAVLGIFLKVGSAKPGLQKVVDVLDSIKTKGKSADFTNFDPRGLLPESLDYWTYPGSLTTPPLLECVTWIVLKEPISVSSEQVLKFRKLNFIGEGEPEELMVDNWRPAQPLKNRQIKASFK

SEQ ID NO: 210956 - DNA, 4224 bp, Artificial Sequence
  Description of Artificial Sequence: Synthetic Construct
atggccttaccagtgaccgccttgctcctgccgctggccttgctgctccacgccgccaggccggacatccagatgacacagactacatcctccctgtctgcctctctgggagacagagtcaccatcagttgcagggcaagtcaggacattagtaaatatttaaattggtatcagcagaaaccagatggaactgttaaactcctgatctaccatacatcaagattacactcaggagtcccatcaaggttcagtggcagtgggtctggaacagattattctctcaccattagcaacctggagcaagaagatattgccacttacttttgccaacagggtaatacgcttccgtacacgttcggaggggggaccaagctggagatcacaggtggcggtggctcgggcggtggtgggtcgggtggcggcggatctgaggtgaaactgcaggagtcaggacctggcctggtggcgccctcacagagcctgtccgtcacatgcactgtctcaggggtctcattacccgactatggtgtaagctggattcgccagcctccacgaaagggtctggagtggctgggagtaatatggggtagtgaaaccacatactataattcagctctcaaatccagactgaccatcatcaaggacaactccaagagccaagttttcttaaaaatgaacagtctgcaaactgatgacacagccatttactactgtgccaaacattattactacggtggtagctatgctatggactactggggccaaggaacctcagtcaccgtctcctcaaccacgacgccagcgccgcgaccaccaacaccggcgcccaccatcgcgtcgcagcccctgtccctgcgcccagaggcgtgccggccagcggcggggggcgcagtgcacacgagggggctggacttcgcctgtgatatctacatctgggcgcccttggccgggacttgtggggtccttctcctgtcactggttatcaccctttactgcaaacggggcagaaagaaactcctgtatatattcaaacaaccatttatgagaccagtacaaactactcaagaggaagatggctgtagctgccgatttccagaagaagaagaaggaggatgtgaactgagagtgaagttcagcaggagcgcagacgcccccgcgtacaagcagggccagaaccagctctataacgagctcaatctaggacgaagagaggagtacgatgttttggacaagagacgtggccgggaccctgagatggggggaaagccgagaaggaagaaccctcaggaaggcctgtacaatgaactgcagaaagataagatggcggaggcctacagtgagattgggatgaaaggcgagcgccggaggggcaaggggcacgatggcctttaccagggtctcagtacagccaccaaggacacctacgacgcccttcacatgcaggccctgccccctcgcggatcagctactaacttcagcctgctgaagcaggctggagacgtggaggagaaccctggacctatgtgccaccaacagctcgtgatcagctggttctccctggtgttcctggctagccccctggtggccatctgggagctcaagaaagacgtgtacgtggtggaactggactggtaccccgacgcccctggcgaaatggtggtgctgacatgcgacacccctgaggaggatggcattacctggaccctcgatcagagctccgaggtgctgggcagcggcaaaaccctgaccatccaggtgaaggagtttggcgatgccggccagtacacatgtcacaagggcggcgaggtgctgagccactccctgctgctgctccacaagaaggaagatggcatctggagcaccgacattctgaaggatcagaaggagcccaagaacaagacattcctgaggtgtgaggccaagaactacagcggcaggtttacctgctggtggctgacaacaatcagcaccgacctcacattctccgtcaagtcctccaggggttcttccgaccctcaaggcgtgacatgcggcgctgccaccctgagcgctgagagagtcaggggcgacaacaaggagtacgagtacagcgtcgaatgtcaggaggacagcgcctgtcccgccgctgaagagagcctgcctatcgaggtgatggtggacgccgtgcacaaactgaagtatgagaattacacctccagcttcttcatcagggacatcatcaaacccgatccccccaagaacctgcagctgaagcctctgaagaacagcagacaggtcgaagtgtcctgggagtaccctgatacctggtccacaccccacagctacttcagcctgaccttttgcgtgcaggtgcagggcaagagcaaaagggagaagaaggacagggtgtttaccgacaagacctccgccacagtgatttgcagaaagaacgcctccatcagcgtgagggcccaggacaggtattacagcagctcctggagcgaatgggctagcgtgccctgtagcggaggaggaggcagcggaggaggaggttctggaggaggcggcagcagaaacctgcctgtcgctacccccgaccccggaatgttcccctgcctgcaccactcccagaacctcctgagggccgtgtccaacatgctgcagaaggctagacagaccctcgaattctacccctgtaccagcgaggagatcgaccatgaggacatcaccaaggataagaccagcaccgtggaggcttgcctgcctctggagctgaccaaaaacgagagctgcctgaacagcagggaaaccagcttcattaccaacggctcctgcctggcctccaggaagacatccttcatgatggccctgtgcctcagcagcatctacgaggacctgaagatgtatcaggtggagtttaagaccatgaatgccaagctgctgatggaccctaagaggcagatcttcctggaccagaatatgctggccgtgattgacgagctgatgcaggccctcaactttaacagcgagaccgtgccccagaaaagcagcctcgaagagcctgacttctacaaaaccaagattaagctgtgtatcctgctgcacgccttcaggatcagggccgtgaccatcgacagggtgatgagctacctgaacgccagcggatctggttctggttccggaagtggatctggttcagggtccggtagtggatctgggtcaggaagtggaagcggtagtgggtctggatctaccacaaccccagcacctcgcccaccaacaccagcaccaaccatcgcatcccagccactgtctctgaggcccgaggcatgtaggcctgcagcaggaggcgccgtgcacaccaggggcctggactttgcctgcgatatctatatctgggcaccactggcaggaacatgtggcgtgctgctgctgtccctggtcatcaccctgtattgcggatcctcccatcactgggggtacggcaaacacaacggacctgagcactggcataaggacttccccattgccaagggagagcgccagtcccctgttgacatcgacactcatacagccaagtatgacccttccctgaagcccctgtctgtttcctatgatcaagcaacttccctgaggatcctcaacaatgatcatgctttcaacgtggtgtttgatgactctcaggacaaagcagtgctcaagggaggacccctggatggcacttacagattgattcagtttcactttcactggggttcacttgatggacaaggttcagagcatactgtggataaaaagaaatatgctgcagaacttcacttggttcactggaacaccaaatatggggattttgggaaagctgtacagcaacctgatggactggccgttctaggtatttttttgaaggttggcagcgctaaaccgggccttcagaaagttgttgatgtgctggattccattaaaacaaagggcaagagtgctgacttcactaacttcgatcctcgtggcctccttcctgaatccctggattactggacctacccaggctcactgaccacccctcctcttctggaatgtgtgacctggattgtgctcaaggaacccatcagcgtcagcagcgagcaggtgttgaaattccgtaaacttaacttcattggggagggtgaacccgaagaactgatggtggacaactggcgcccagctcagccactgaagaacaggcaaatcaaagcttccttcaaatga

SEQ ID NO: 210957 - protein, 1407 aa, Artificial Sequence
  Description of Artificial Sequence: Synthetic Construct
MALPVTALLLPLALLLHAARPDIQMTQTTSSLSASLGDRVTISCRASQDISKYLNWYQQKPDGTVKLLIYHTSRLHSGVPSRFSGSGSGTDYSLTISNLEQEDIATYFCQQGNTLPYTFGGGTKLEITGGGGSGGGGSGGGGSEVKLQESGPGLVAPSQSLSVTCTVSGVSLPDYGVSWIRQPPRKGLEWLGVIWGSETTYYNSALKSRLTIIKDNSKSQVFLKMNSLQTDDTAIYYCAKHYYYGGSYAMDYWGQGTSVTVSSTTTPAPRPPTPAPTIASQPLSLRPEACRPAAGGAVHTRGLDFACDIYIWAPLAGTCGVLLLSLVITLYCKRGRKKLLYIFKQPFMRPVQTTQEEDGCSCRFPEEEEGGCELRVKFSRSADAPAYKQGQNQLYNELNLGRREEYDVLDKRRGRDPEMGGKPRRKNPQEGLYNELQKDKMAEAYSEIGMKGERRRGKGHDGLYQGLSTATKDTYDALHMQALPPRGSATNFSLLKQAGDVEENPGPMCHQQLVISWFSLVFLASPLVAIWELKKDVYVVELDWYPDAPGEMVVLTCDTPEEDGITWTLDQSSEVLGSGKTLTIQVKEFGDAGQYTCHKGGEVLSHSLLLLHKKEDGIWSTDILKDQKEPKNKTFLRCEAKNYSGRFTCWWLTTISTDLTFSVKSSRGSSDPQGVTCGAATLSAERVRGDNKEYEYSVECQEDSACPAAEESLPIEVMVDAVHKLKYENYTSSFFIRDIIKPDPPKNLQLKPLKNSRQVEVSWEYPDTWSTPHSYFSLTFCVQVQGKSKREKKDRVFTDKTSATVICRKNASISVRAQDRYYSSSWSEWASVPCSGGGGSGGGGSGGGGSRNLPVATPDPGMFPCLHHSQNLLRAVSNMLQKARQTLEFYPCTSEEIDHEDITKDKTSTVEACLPLELTKNESCLNSRETSFITNGSCLASRKTSFMMALCLSSIYEDLKMYQVEFKTMNAKLLMDPKRQIFLDQNMLAVIDELMQALNFNSETVPQKSSLEEPDFYKTKIKLCILLHAFRIRAVTIDRVMSYLNASGSGSGSGSGSGSGSGSGSGSGSGSGSGSGSTTTPAPRPPTPAPTIASQPLSLRPEACRPAAGGAVHTRGLDFACDIYIWAPLAGTCGVLLLSLVITLYCGSSHHWGYGKHNGPEHWHKDFPIAKGELQSPVDIDTHTAKYDPSLKPLSVSYDQATSLRILNNGHAFNVEFDDSQDKAVLKGGPLDGIYRLIQFHFHWGSLDGQGSEHTVDKKKYAAELHLVYWNTKYGDFGKAVQQPDGLAVLGIFLKVGSAKPGLQKVVDVLDSIKTKGKSADFTNFDPRGLLPESLDYWTYPGSLTTPPLLECVTWIVLKEPISVSSEQVLKFRKLNFNGEGEPEELMVDNWRPAQPLKDRQIKASFK

SEQ ID NO: 210958 - DNA, 4224 bp, Artificial Sequence
  Description of Artificial Sequence: Synthetic Construct
atggccttaccagtgaccgccttgctcctgccgctggccttgctgctccacgccgccaggccggacatccagatgacacagactacatcctccctgtctgcctctctgggagacagagtcaccatcagttgcagggcaagtcaggacattagtaaatatttaaattggtatcagcagaaaccagatggaactgttaaactcctgatctaccatacatcaagattacactcaggagtcccatcaaggttcagtggcagtgggtctggaacagattattctctcaccattagcaacctggagcaagaagatattgccacttacttttgccaacagggtaatacgcttccgtacacgttcggaggggggaccaagctggagatcacaggtggcggtggctcgggcggtggtgggtcgggtggcggcggatctgaggtgaaactgcaggagtcaggacctggcctggtggcgccctcacagagcctgtccgtcacatgcactgtctcaggggtctcattacccgactatggtgtaagctggattcgccagcctccacgaaagggtctggagtggctgggagtaatatggggtagtgaaaccacatactataattcagctctcaaatccagactgaccatcatcaaggacaactccaagagccaagttttcttaaaaatgaacagtctgcaaactgatgacacagccatttactactgtgccaaacattattactacggtggtagctatgctatggactactggggccaaggaacctcagtcaccgtctcctcaaccacgacgccagcgccgcgaccaccaacaccggcgcccaccatcgcgtcgcagcccctgtccctgcgcccagaggcgtgccggccagcggcggggggcgcagtgcacacgagggggctggacttcgcctgtgatatctacatctgggcgcccttggccgggacttgtggggtccttctcctgtcactggttatcaccctttactgcaaacggggcagaaagaaactcctgtatatattcaaacaaccatttatgagaccagtacaaactactcaagaggaagatggctgtagctgccgatttccagaagaagaagaaggaggatgtgaactgagagtgaagttcagcaggagcgcagacgcccccgcgtacaagcagggccagaaccagctctataacgagctcaatctaggacgaagagaggagtacgatgttttggacaagagacgtggccgggaccctgagatggggggaaagccgagaaggaagaaccctcaggaaggcctgtacaatgaactgcagaaagataagatggcggaggcctacagtgagattgggatgaaaggcgagcgccggaggggcaaggggcacgatggcctttaccagggtctcagtacagccaccaaggacacctacgacgcccttcacatgcaggccctgccccctcgcggatcagctactaacttcagcctgctgaagcaggctggagacgtggaggagaaccctggacctatgtgccaccaacagctcgtgatcagctggttctccctggtgttcctggctagccccctggtggccatctgggagctcaagaaagacgtgtacgtggtggaactggactggtaccccgacgcccctggcgaaatggtggtgctgacatgcgacacccctgaggaggatggcattacctggaccctcgatcagagctccgaggtgctgggcagcggcaaaaccctgaccatccaggtgaaggagtttggcgatgccggccagtacacatgtcacaagggcggcgaggtgctgagccactccctgctgctgctccacaagaaggaagatggcatctggagcaccgacattctgaaggatcagaaggagcccaagaacaagacattcctgaggtgtgaggccaagaactacagcggcaggtttacctgctggtggctgacaacaatcagcaccgacctcacattctccgtcaagtcctccaggggttcttccgaccctcaaggcgtgacatgcggcgctgccaccctgagcgctgagagagtcaggggcgacaacaaggagtacgagtacagcgtcgaatgtcaggaggacagcgcctgtcccgccgctgaagagagcctgcctatcgaggtgatggtggacgccgtgcacaaactgaagtatgagaattacacctccagcttcttcatcagggacatcatcaaacccgatccccccaagaacctgcagctgaagcctctgaagaacagcagacaggtcgaagtgtcctgggagtaccctgatacctggtccacaccccacagctacttcagcctgaccttttgcgtgcaggtgcagggcaagagcaaaagggagaagaaggacagggtgtttaccgacaagacctccgccacagtgatttgcagaaagaacgcctccatcagcgtgagggcccaggacaggtattacagcagctcctggagcgaatgggctagcgtgccctgtagcggaggaggaggcagcggaggaggaggttctggaggaggcggcagcagaaacctgcctgtcgctacccccgaccccggaatgttcccctgcctgcaccactcccagaacctcctgagggccgtgtccaacatgctgcagaaggctagacagaccctcgaattctacccctgtaccagcgaggagatcgaccatgaggacatcaccaaggataagaccagcaccgtggaggcttgcctgcctctggagctgaccaaaaacgagagctgcctgaacagcagggaaaccagcttcattaccaacggctcctgcctggcctccaggaagacatccttcatgatggccctgtgcctcagcagcatctacgaggacctgaagatgtatcaggtggagtttaagaccatgaatgccaagctgctgatggaccctaagaggcagatcttcctggaccagaatatgctggccgtgattgacgagctgatgcaggccctcaactttaacagcgagaccgtgccccagaaaagcagcctcgaagagcctgacttctacaaaaccaagattaagctgtgtatcctgctgcacgccttcaggatcagggccgtgaccatcgacagggtgatgagctacctgaacgccagcggatctggttctggttccggaagtggatctggttcagggtccggtagtggatctgggtcaggaagtggaagcggtagtgggtctggatctaccacaaccccagcacctcgcccaccaacaccagcaccaaccatcgcatcccagccactgtctctgaggcccgaggcatgtaggcctgcagcaggaggcgccgtgcacaccaggggcctggactttgcctgcgatatctatatctgggcaccactggcaggaacatgtggcgtgctgctgctgtccctggtcatcaccctgtattgcggatcctcccatcactgggggtacggcaaacacaacggacctgagcactggcataaggacttccccattgccaagggagagctccagtcccctgttgacatcgacactcatacagccaagtatgacccttccctgaagcccctgtctgtttcctatgatcaagcaacttccctgaggatcctcaacaatggtcatgctttcaacgtggagtttgatgactctcaggacaaagcagtgctcaagggaggacccctggatggcatttacagattgattcagtttcactttcactggggttcacttgatggacaaggttcagagcatactgtggataaaaagaaatatgctgcagaacttcacttggtttactggaacaccaaatatggggattttgggaaagctgtgcagcaacctgatggactggccgttctaggtatttttttgaaggttggcagcgctaaaccgggccttcagaaagttgttgatgtgctggattccattaaaacaaagggcaagagtgctgacttcactaacttcgatcctcgtggcctccttcctgaatccctggattactggacctacccaggctcactgaccacccctcctcttctggaatgtgtgacctggattgtgctcaaggaacccatcagcgtcagcagcgagcaggtgttgaaattccgtaaacttaacttcaatggggagggtgaacccgaagaactgatggtggacaactggcgcccagctcagccactgaaggacaggcaaatcaaagcttccttcaaatga

SEQ ID NO: 210959 - protein, 1148 aa, Artificial Sequence
  Description of Artificial Sequence: Synthetic Construct
MALPVTALLLPLALLLHAARPDIQMTQTTSSLSASLGDRVTISCRASQDISKYLNWYQQKPDGTVKLLIYHTSRLHSGVPSRFSGSGSGTDYSLTISNLEQEDIATYFCQQGNTLPYTFGGGTKLEITGGGGSGGGGSGGGGSEVKLQESGPGLVAPSQSLSVTCTVSGVSLPDYGVSWIRQPPRKGLEWLGVIWGSETTYYNSALKSRLTIIKDNSKSQVFLKMNSLQTDDTAIYYCAKHYYYGGSYAMDYWGQGTSVTVSSTTTPAPRPPTPAPTIASQPLSLRPEACRPAAGGAVHTRGLDFACDIYIWAPLAGTCGVLLLSLVITLYCKRGRKKLLYIFKQPFMRPVQTTQEEDGCSCRFPEEEEGGCELRVKFSRSADAPAYKQGQNQLYNELNLGRREEYDVLDKRRGRDPEMGGKPRRKNPQEGLYNELQKDKMAEAYSEIGMKGERRRGKGHDGLYQGLSTATKDTYDALHMQALPPRGSATNFSLLKQAGDVEENPGPMCHQQLVISWFSLVFLASPLVAIWELKKDVYVVELDWYPDAPGEMVVLTCDTPEEDGITWTLDQSSEVLGSGKTLTIQVKEFGDAGQYTCHKGGEVLSHSLLLLHKKEDGIWSTDILKDQKEPKNKTFLRCEAKNYSGRFTCWWLTTISTDLTFSVKSSRGSSDPQGVTCGAATLSAERVRGDNKEYEYSVECQEDSACPAAEESLPIEVMVDAVHKLKYENYTSSFFIRDIIKPDPPKNLQLKPLKNSRQVEVSWEYPDTWSTPHSYFSLTFCVQVQGKSKREKKDRVFTDKTSATVICRKNASISVRAQDRYYSSSWSEWASVPCSGGGGSGGGGSGGGGSRNLPVATPDPGMFPCLHHSQNLLRAVSNMLQKARQTLEFYPCTSEEIDHEDITKDKTSTVEACLPLELTKNESCLNSRETSFITNGSCLASRKTSFMMALCLSSIYEDLKMYQVEFKTMNAKLLMDPKRQIFLDQNMLAVIDELMQALNFNSETVPQKSSLEEPDFYKTKIKLCILLHAFRIRAVTIDRVMSYLNASGSGSGSGSGSGSGSGSGSGSGSGSGSGSGSTTTPAPRPPTPAPTIASQPLSLRPEACRPAAGGAVHTRGLDFACDIYIWAPLAGTCGVLLLSLVITLYCGS

SEQ ID NO: 210960 - DNA, 3447 bp, Artificial Sequence
  Description of Artificial Sequence: Synthetic Construct
atggccttaccagtgaccgccttgctcctgccgctggccttgctgctccacgccgccaggccggacatccagatgacacagactacatcctccctgtctgcctctctgggagacagagtcaccatcagttgcagggcaagtcaggacattagtaaatatttaaattggtatcagcagaaaccagatggaactgttaaactcctgatctaccatacatcaagattacactcaggagtcccatcaaggttcagtggcagtgggtctggaacagattattctctcaccattagcaacctggagcaagaagatattgccacttacttttgccaacagggtaatacgcttccgtacacgttcggaggggggaccaagctggagatcacaggtggcggtggctcgggcggtggtgggtcgggtggcggcggatctgaggtgaaactgcaggagtcaggacctggcctggtggcgccctcacagagcctgtccgtcacatgcactgtctcaggggtctcattacccgactatggtgtaagctggattcgccagcctccacgaaagggtctggagtggctgggagtaatatggggtagtgaaaccacatactataattcagctctcaaatccagactgaccatcatcaaggacaactccaagagccaagttttcttaaaaatgaacagtctgcaaactgatgacacagccatttactactgtgccaaacattattactacggtggtagctatgctatggactactggggccaaggaacctcagtcaccgtctcctcaaccacgacgccagcgccgcgaccaccaacaccggcgcccaccatcgcgtcgcagcccctgtccctgcgcccagaggcgtgccggccagcggcggggggcgcagtgcacacgagggggctggacttcgcctgtgatatctacatctgggcgcccttggccgggacttgtggggtccttctcctgtcactggttatcaccctttactgcaaacggggcagaaagaaactcctgtatatattcaaacaaccatttatgagaccagtacaaactactcaagaggaagatggctgtagctgccgatttccagaagaagaagaaggaggatgtgaactgagagtgaagttcagcaggagcgcagacgcccccgcgtacaagcagggccagaaccagctctataacgagctcaatctaggacgaagagaggagtacgatgttttggacaagagacgtggccgggaccctgagatggggggaaagccgagaaggaagaaccctcaggaaggcctgtacaatgaactgcagaaagataagatggcggaggcctacagtgagattgggatgaaaggcgagcgccggaggggcaaggggcacgatggcctttaccagggtctcagtacagccaccaaggacacctacgacgcccttcacatgcaggccctgccccctcgcggatcagctactaacttcagcctgctgaagcaggctggagacgtggaggagaaccctggacctatgtgccaccaacagctcgtgatcagctggttctccctggtgttcctggctagccccctggtggccatctgggagctcaagaaagacgtgtacgtggtggaactggactggtaccccgacgcccctggcgaaatggtggtgctgacatgcgacacccctgaggaggatggcattacctggaccctcgatcagagctccgaggtgctgggcagcggcaaaaccctgaccatccaggtgaaggagtttggcgatgccggccagtacacatgtcacaagggcggcgaggtgctgagccactccctgctgctgctccacaagaaggaagatggcatctggagcaccgacattctgaaggatcagaaggagcccaagaacaagacattcctgaggtgtgaggccaagaactacagcggcaggtttacctgctggtggctgacaacaatcagcaccgacctcacattctccgtcaagtcctccaggggttcttccgaccctcaaggcgtgacatgcggcgctgccaccctgagcgctgagagagtcaggggcgacaacaaggagtacgagtacagcgtcgaatgtcaggaggacagcgcctgtcccgccgctgaagagagcctgcctatcgaggtgatggtggacgccgtgcacaaactgaagtatgagaattacacctccagcttcttcatcagggacatcatcaaacccgatccccccaagaacctgcagctgaagcctctgaagaacagcagacaggtcgaagtgtcctgggagtaccctgatacctggtccacaccccacagctacttcagcctgaccttttgcgtgcaggtgcagggcaagagcaaaagggagaagaaggacagggtgtttaccgacaagacctccgccacagtgatttgcagaaagaacgcctccatcagcgtgagggcccaggacaggtattacagcagctcctggagcgaatgggctagcgtgccctgtagcggaggaggaggcagcggaggaggaggttctggaggaggcggcagcagaaacctgcctgtcgctacccccgaccccggaatgttcccctgcctgcaccactcccagaacctcctgagggccgtgtccaacatgctgcagaaggctagacagaccctcgaattctacccctgtaccagcgaggagatcgaccatgaggacatcaccaaggataagaccagcaccgtggaggcttgcctgcctctggagctgaccaaaaacgagagctgcctgaacagcagggaaaccagcttcattaccaacggctcctgcctggcctccaggaagacatccttcatgatggccctgtgcctcagcagcatctacgaggacctgaagatgtatcaggtggagtttaagaccatgaatgccaagctgctgatggaccctaagaggcagatcttcctggaccagaatatgctggccgtgattgacgagctgatgcaggccctcaactttaacagcgagaccgtgccccagaaaagcagcctcgaagagcctgacttctacaaaaccaagattaagctgtgtatcctgctgcacgccttcaggatcagggccgtgaccatcgacagggtgatgagctacctgaacgccagcggatctggttctggttccggaagtggatctggttcagggtccggtagtggatctgggtcaggaagtggaagcggtagtgggtctggatctaccacaaccccagcacctcgcccaccaacaccagcaccaaccatcgcatcccagccactgtctctgaggcccgaggcatgtaggcctgcagcaggaggcgccgtgcacaccaggggcctggactttgcctgcgatatctatatctgggcaccactggcaggaacatgtggcgtgctgctgctgtccctggtcatcaccctgtattgcggatcctga

SEQ ID NO: 210961 - protein, 1407 aa, Artificial Sequence
  Description of Artificial Sequence: Synthetic Construct
MALPVTALLLPLALLLHAARPDIQMTQTTSSLSASLGDRVTISCRASQDISKYLNWYQQKPDGTVKLLIYHTSRLHSGVPSRFSGSGSGTDYSLTISNLEQEDIATYFCQQGNTLPYTFGGGTKLEITGGGGSGGGGSGGGGSEVKLQESGPGLVAPSQSLSVTCTVSGVSLPDYGVSWIRQPPRKGLEWLGVIWGSETTYYNSALKSRLTIIKDNSKSQVFLKMNSLQTDDTAIYYCAKHYYYGGSYAMDYWGQGTSVTVSSTTTPAPRPPTPAPTIASQPLSLRPEACRPAAGGAVHTRGLDFACDIYIWAPLAGTCGVLLLSLVITLYCKRGRKKLLYIFKQPFMRPVQTTQEEDGCSCRFPEEEEGGCELRVKFSRSADAPAYKQGQNQLYNELNLGRREEYDVLDKRRGRDPEMGGKPRRKNPQEGLYNELQKDKMAEAYSEIGMKGERRRGKGHDGLYQGLSTATKDTYDALHMQALPPRGSATNFSLLKQAGDVEENPGPMCHQQLVISWFSLVFLASPLVAIWELKKDVYVVELDWYPDAPGEMVVLTCDTPEEDGITWTLDQSSEVLGSGKTLTIQVKEFGDAGQYTCHKGGEVLSHSLLLLHKKEDGIWSTDILKDQKEPKNKTFLRCEAKNYSGRFTCWWLTTISTDLTFSVKSSRGSSDPQGVTCGAATLSAERVRGDNKEYEYSVECQEDSACPAAEESLPIEVMVDAVHKLKYENYTSSFFIRDIIKPDPPKNLQLKPLKNSRQVEVSWEYPDTWSTPHSYFSLTFCVQVQGKSKREKKDRVFTDKTSATVICRKNASISVRAQDRYYSSSWSEWASVPCSGGGGSGGGGSGGGGSRNLPVATPDPGMFPCLHHSQNLLRAVSNMLQKARQTLEFYPCTSEEIDHEDITKDKTSTVEACLPLELTKNESCLNSRETSFITNGSCLASRKTSFMMALCLSSIYEDLKMYQVEFKTMNAKLLMDPKRQIFLDQNMLAVIDELMQALNFNSETVPQKSSLEEPDFYKTKIKLCILLHAFRIRAVTIDRVMSYLNASGSGSGSGSGSGSGSGSGSGSGSGSGSGSGSTTTPAPRPPTPAPTIASQPLSLRPEACRPAAGGAVHTRGLDFACDIYIWAPLAGTCGVLLLSLVITLYCGSSHHWGYGKHNGPEHWHKDFPIAKGERQSPVDIDTHTAKYDPSLKPLSVSYDQATSLRILNNGHAFNVEFDDSQDKAVLKGGPLDGTYRLIQFHFHWGSLDGQGSEHTVDKKKYAAELHLVHWNTKYGDFGKAVQQPDGLAVLGIFLKVGSAKPGLQKVVDVLDSIKTKGKSADFTNFDPRGLLPESLDYWTYPGSLTTPPLLECVTWIVLKEPISVSSEQVLKFRKLNFNGEGEPEELMVDNWRPAQPLKNRQIKASFK

SEQ ID NO: 210962 - DNA, 4224 bp, Artificial Sequence
  Description of Artificial Sequence: Synthetic Construct
atggccttaccagtgaccgccttgctcctgccgctggccttgctgctccacgccgccaggccggacatccagatgacacagactacatcctccctgtctgcctctctgggagacagagtcaccatcagttgcagggcaagtcaggacattagtaaatatttaaattggtatcagcagaaaccagatggaactgttaaactcctgatctaccatacatcaagattacactcaggagtcccatcaaggttcagtggcagtgggtctggaacagattattctctcaccattagcaacctggagcaagaagatattgccacttacttttgccaacagggtaatacgcttccgtacacgttcggaggggggaccaagctggagatcacaggtggcggtggctcgggcggtggtgggtcgggtggcggcggatctgaggtgaaactgcaggagtcaggacctggcctggtggcgccctcacagagcctgtccgtcacatgcactgtctcaggggtctcattacccgactatggtgtaagctggattcgccagcctccacgaaagggtctggagtggctgggagtaatatggggtagtgaaaccacatactataattcagctctcaaatccagactgaccatcatcaaggacaactccaagagccaagttttcttaaaaatgaacagtctgcaaactgatgacacagccatttactactgtgccaaacattattactacggtggtagctatgctatggactactggggccaaggaacctcagtcaccgtctcctcaaccacgacgccagcgccgcgaccaccaacaccggcgcccaccatcgcgtcgcagcccctgtccctgcgcccagaggcgtgccggccagcggcggggggcgcagtgcacacgagggggctggacttcgcctgtgatatctacatctgggcgcccttggccgggacttgtggggtccttctcctgtcactggttatcaccctttactgcaaacggggcagaaagaaactcctgtatatattcaaacaaccatttatgagaccagtacaaactactcaagaggaagatggctgtagctgccgatttccagaagaagaagaaggaggatgtgaactgagagtgaagttcagcaggagcgcagacgcccccgcgtacaagcagggccagaaccagctctataacgagctcaatctaggacgaagagaggagtacgatgttttggacaagagacgtggccgggaccctgagatggggggaaagccgagaaggaagaaccctcaggaaggcctgtacaatgaactgcagaaagataagatggcggaggcctacagtgagattgggatgaaaggcgagcgccggaggggcaaggggcacgatggcctttaccagggtctcagtacagccaccaaggacacctacgacgcccttcacatgcaggccctgccccctcgcggatcagctactaacttcagcctgctgaagcaggctggagacgtggaggagaaccctggacctatgtgccaccaacagctcgtgatcagctggttctccctggtgttcctggctagccccctggtggccatctgggagctcaagaaagacgtgtacgtggtggaactggactggtaccccgacgcccctggcgaaatggtggtgctgacatgcgacacccctgaggaggatggcattacctggaccctcgatcagagctccgaggtgctgggcagcggcaaaaccctgaccatccaggtgaaggagtttggcgatgccggccagtacacatgtcacaagggcggcgaggtgctgagccactccctgctgctgctccacaagaaggaagatggcatctggagcaccgacattctgaaggatcagaaggagcccaagaacaagacattcctgaggtgtgaggccaagaactacagcggcaggtttacctgctggtggctgacaacaatcagcaccgacctcacattctccgtcaagtcctccaggggttcttccgaccctcaaggcgtgacatgcggcgctgccaccctgagcgctgagagagtcaggggcgacaacaaggagtacgagtacagcgtcgaatgtcaggaggacagcgcctgtcccgccgctgaagagagcctgcctatcgaggtgatggtggacgccgtgcacaaactgaagtatgagaattacacctccagcttcttcatcagggacatcatcaaacccgatccccccaagaacctgcagctgaagcctctgaagaacagcagacaggtcgaagtgtcctgggagtaccctgatacctggtccacaccccacagctacttcagcctgaccttttgcgtgcaggtgcagggcaagagcaaaagggagaagaaggacagggtgtttaccgacaagacctccgccacagtgatttgcagaaagaacgcctccatcagcgtgagggcccaggacaggtattacagcagctcctggagcgaatgggctagcgtgccctgtagcggaggaggaggcagcggaggaggaggttctggaggaggcggcagcagaaacctgcctgtcgctacccccgaccccggaatgttcccctgcctgcaccactcccagaacctcctgagggccgtgtccaacatgctgcagaaggctagacagaccctcgaattctacccctgtaccagcgaggagatcgaccatgaggacatcaccaaggataagaccagcaccgtggaggcttgcctgcctctggagctgaccaaaaacgagagctgcctgaacagcagggaaaccagcttcattaccaacggctcctgcctggcctccaggaagacatccttcatgatggccctgtgcctcagcagcatctacgaggacctgaagatgtatcaggtggagtttaagaccatgaatgccaagctgctgatggaccctaagaggcagatcttcctggaccagaatatgctggccgtgattgacgagctgatgcaggccctcaactttaacagcgagaccgtgccccagaaaagcagcctcgaagagcctgacttctacaaaaccaagattaagctgtgtatcctgctgcacgccttcaggatcagggccgtgaccatcgacagggtgatgagctacctgaacgccagcggatctggttctggttccggaagtggatctggttcagggtccggtagtggatctgggtcaggaagtggaagcggtagtgggtctggatctaccacaaccccagcacctcgcccaccaacaccagcaccaaccatcgcatcccagccactgtctctgaggcccgaggcatgtaggcctgcagcaggaggcgccgtgcacaccaggggcctggactttgcctgcgatatctatatctgggcaccactggcaggaacatgtggcgtgctgctgctgtccctggtcatcaccctgtattgcggatcctcccatcactgggggtacggcaaacacaacggacctgagcactggcataaggacttccccattgccaagggagagcgccagtcccctgttgacatcgacactcatacagccaagtatgacccttccctgaagcccctgtctgtttcctatgatcaagcaacttccctgaggatcctcaacaatggtcatgctttcaacgtggagtttgatgactctcaggacaaagcagtgctcaagggaggacccctggatggcacttacagattgattcagtttcactttcactggggttcacttgatggacaaggttcagagcatactgtggataaaaagaaatatgctgcagaacttcacttggttcactggaacaccaaatatggggattttgggaaagctgtgcagcaacctgatggactggccgttctaggtatttttttgaaggttggcagcgctaaaccgggccttcagaaagttgttgatgtgctggattccattaaaacaaagggcaagagtgctgacttcactaacttcgatcctcgtggcctccttcctgaatccctggattactggacctacccaggctcactgaccacccctcctcttctggaatgtgtgacctggattgtgctcaaggaacccatcagcgtcagcagcgagcaggtgttgaaattccgtaaacttaacttcaatggggagggtgaacccgaagaactgatggtggacaactggcgcccagctcagccactgaagaacaggcaaatcaaagcttccttcaaatga

SEQ ID NO: 210963 - protein, 486 aa, Artificial Sequence; identical to SEQ ID NO: 206645
  Description of Artificial Sequence: Synthetic Construct

SEQ ID NO: 210964 - DNA, 1461 bp, Artificial Sequence
  Description of Artificial Sequence: Synthetic Construct
atggccttaccagtgaccgccttgctcctgccgctggccttgctgctccacgccgccaggccggacatccagatgacacagactacatcctccctgtctgcctctctgggagacagagtcaccatcagttgcagggcaagtcaggacattagtaaatatttaaattggtatcagcagaaaccagatggaactgttaaactcctgatctaccatacatcaagattacactcaggagtcccatcaaggttcagtggcagtgggtctggaacagattattctctcaccattagcaacctggagcaagaagatattgccacttacttttgccaacagggtaatacgcttccgtacacgttcggaggggggaccaagctggagatcacaggtggcggtggctcgggcggtggtgggtcgggtggcggcggatctgaggtgaaactgcaggagtcaggacctggcctggtggcgccctcacagagcctgtccgtcacatgcactgtctcaggggtctcattacccgactatggtgtaagctggattcgccagcctccacgaaagggtctggagtggctgggagtaatatggggtagtgaaaccacatactataattcagctctcaaatccagactgaccatcatcaaggacaactccaagagccaagttttcttaaaaatgaacagtctgcaaactgatgacacagccatttactactgtgccaaacattattactacggtggtagctatgctatggactactggggccaaggaacctcagtcaccgtctcctcaaccacgacgccagcgccgcgaccaccaacaccggcgcccaccatcgcgtcgcagcccctgtccctgcgcccagaggcgtgccggccagcggcggggggcgcagtgcacacgagggggctggacttcgcctgtgatatctacatctgggcgcccttggccgggacttgtggggtccttctcctgtcactggttatcaccctttactgcaaacggggcagaaagaaactcctgtatatattcaaacaaccatttatgagaccagtacaaactactcaagaggaagatggctgtagctgccgatttccagaagaagaagaaggaggatgtgaactgagagtgaagttcagcaggagcgcagacgcccccgcgtacaagcagggccagaaccagctctataacgagctcaatctaggacgaagagaggagtacgatgttttggacaagagacgtggccgggaccctgagatggggggaaagccgagaaggaagaaccctcaggaaggcctgtacaatgaactgcagaaagataagatggcggaggcctacagtgagattgggatgaaaggcgagcgccggaggggcaaggggcacgatggcctttaccagggtctcagtacagccaccaaggacacctacgacgcccttcacatgcaggccctgccccctcgctaa

SEQ ID NO: 210965 - protein, 6 aa, Artificial Sequence
  Description of Artificial Sequence: Synthetic Linker
EKGERV

SEQ ID NO: 210966 - protein, 4 aa, Artificial Sequence
  Description of Artificial Sequence: Synthetic peptide
KTEL

SEQ ID NO: 210967 - protein, 4 aa, Artificial Sequence
  Description of Artificial Sequence: Synthetic peptide
CWCV

SEQ ID NO: 210968 - protein, 259 aa, Artificial Sequence
  Description of Artificial Sequence: Synthetic Destabilizing Domain (DD)
SHHWGYGKHNGPEHWHKDFPIAKGERQSPVDIDTHTAKYDPSLKPLSVSYDQATSLRILNNGHAFNVEFDDSQDKAVLKGGPLDGTYRLIQFHFHWGSLDGQGSDHTVDKKKYAAELHLVHWNTKYGDFGKAVQQPDGLAVLGIFLKVGSAKPGLQKVVDVLDSIKTKGKSADFTNFDPRGLLPESLDYWTYPGSLTTPPLLECVTWIVLKEPISVSSEQVLKFRKLNFNGEGEPEELMVDNWRPAQPLKNRQIKASFK

SEQ ID NO: 210969 - protein, 259 aa, Artificial Sequence; identical to SEQ ID NO: 210598
  Description of Artificial Sequence: Synthetic Destabilizing Domain (DD)

SEQ ID NO: 210970 - protein, 259 aa, Artificial Sequence; identical to SEQ ID NO: 210760
  Description of Artificial Sequence: Synthetic Destabilizing Domain (DD)

SEQ ID NO: 210971 - protein, 259 aa, Artificial Sequence; identical to SEQ ID NO: 210756
  Description of Artificial Sequence: Synthetic Destabilizing Domain (DD)

SEQ ID NO: 210972 - protein, 259 aa, Artificial Sequence; identical to SEQ ID NO: 210600
  Description of Artificial Sequence: Synthetic Destabilizing Domain (DD)

SEQ ID NO: 210973 - protein, 259 aa, Artificial Sequence; identical to SEQ ID NO: 210702
  Description of Artificial Sequence: Synthetic Destabilizing Domain (DD)

SEQ ID NO: 210974 - protein, 259 aa, Artificial Sequence
  Description of Artificial Sequence: Synthetic Destabilizing Domain (DD)
SHHWGYGKHNGPEHWHKDFPIAKGERQSPVDIDTHTAKYDPSLKPLSVSYDQATSLRNLNNGHAFNVEFDDSQDKAVLKGGPLDGTYRLIQFHFHWGSLDGQGSEHTVDKKKYAAELHLVHWNTKYGDFGKAVQQPDGLAVLGIFLKVGSAKPGLQKVVDVLDSIKTKGKSADFTNFDPRGLLPESLDYWTYPGSLTTPPLLECVTWIVLKEPISVSSEQVLKFRKLNFNGEGEPEELMVDNWRPAQPLKNRQIKASFK

SEQ ID NO: 210975 - protein, 259 aa, Artificial Sequence
  Description of Artificial Sequence: Synthetic Destabilizing Domain (DD)
SHHWGYGKHNGPEHWHKDFPIAKGERQSPVDIDTHTAKYDPSLKPLSVSYDQATSLRILNNDHAFNVEFDDSQDKAVLKGGPLDGTYRLIQFHFHWGSLDGQGSEHTVDKKKYAAELHLVHWNTKYGDFGKAVQQPDGLAVLGIFLKVGSAKPGLQKVVDVLDSIKTKGKSADFTNFDPRGLLPESLDYWTYPGSLTTPPLLECVTWIVLKEPISVSSEQVLKFRKLNFNGEGEPEELMVDNWRPAQPLKNRQIKASFK

SEQ ID NO: 210976 - protein, 259 aa, Artificial Sequence
  Description of Artificial Sequence: Synthetic Destabilizing Domain (DD)
SHHWGYGKHNGPEHWHKDFPIAKGERQSPVDIDTHTAKYDPSLKPLSVSYDQATSLRILNNGHAFNVEFDDSQDKAVLKGGPLDGTYRLIQFHFHWGSLDGQGSEHTVDKKKYAAELHLVYWNTKYGDFGKAVQQPDGLAVLGIFLKVGSAKPGLQKVVDVLDSIKTKGKSADFTNFDPRGLLPESLDYWTYPGSLTTPPLLECVTWIVLKEPISVSSEQVLKFRKLNFNGEGEPEELMVDNWRPAQPLKNRQIKASFK

SEQ ID NO: 210977 - protein, 259 aa, Artificial Sequence; identical to SEQ ID NO: 210578
  Description of Artificial Sequence: Synthetic Destabilizing Domain (DD)

SEQ ID NO: 210978 - protein, 259 aa, Artificial Sequence; identical to SEQ ID NO: 210514
  Description of Artificial Sequence: Synthetic Destabilizing Domain (DD)

SEQ ID NO: 210979 - protein, 259 aa, Artificial Sequence; identical to SEQ ID NO: 210534
  Description of Artificial Sequence: Synthetic Destabilizing Domain (DD)

SEQ ID NO: 210980 - protein, 259 aa, Artificial Sequence; identical to SEQ ID NO: 210600
  Description of Artificial Sequence: Synthetic Destabilizing Domain (DD)

SEQ ID NO: 210981 - protein, 259 aa, Artificial Sequence
  Description of Artificial Sequence: Synthetic Destabilizing Domain (DD)
SHHWGYGKHNGPEHWHKDFPIAKGELQSPVDIDTHTAKYDPSLKPLSVSYDQATSLRILNNGHAFNVEFDDSQDKAVLKGGPLDGTYRLIQFHFHWGSLDGQGSEHTVDKKKYAAELHLVYWNTKYGDFGKAVQQPDGLAVLGIFLKVGSAKPGLQKVVDVLDSIKTKGKSADFTNFDPRGLLPESLDYWTYPGSLTTPPLLECVTWIVLKEPISVSSEQVLKFRKLNFNGEGEPEELMVDNWRPAQPLKNRQIKASFK

SEQ ID NO: 210982 - protein, 259 aa, Artificial Sequence
  Description of Artificial Sequence: Synthetic Destabilizing Domain (DD)
SHHWGYGKHNGPEHWHKDFPIAKGERQSPVDIDTHTAKYDPSLKPLSVSYDQATSLRILNNGHAFNVEFDDSQDKAVLKGGPLDGIYRLIQFHFHWGSLDGQGSEHTVDKKKYAAELHLVYWNTKYGDFGKAVQQPDGLAVLGIFLKVGSAKPGLQKVVDVLDSIKTKGKSADFTNFDPRGLLPESLDYWTYPGSLTTPPLLECVTWIVLKEPISVSSEQVLKFRKLNFNGEGEPEELMVDNWRPAQPLKNRQIKASFK

SEQ ID NO: 210983 - protein, 259 aa, Artificial Sequence
  Description of Artificial Sequence: Synthetic Destabilizing Domain (DD)
SHHWGYGKHNGPEHWHKDFPIAKGERQSPVDIDTHTAKYDPSLKPLSVSYDQATSLRILNNGHAFNVEFDDSQDKAVLKGGPLDGTYRLIQFHFHWGSLDGQGSEHTVDKKKYAAELHLVYWNTKYGDFGKAVQQPDGLAVLGIFLKVGSAKPGLQKVVDVLDSIKTKGKSADFTNFDPRGLLPESLDYWTYPGSLTTPPLLECVTWIVLKEPISVSSEQVLKFRKLNFNGEGEPEELMVDNWRPAQPLKDRQIKASFK

SEQ ID NO: 210984 - protein, 259 aa, Artificial Sequence
  Description of Artificial Sequence: Synthetic Destabilizing Domain (DD)
SHHWGYGKHNGPEHWHKDFPIAKGERQSPVDIDTHTAKYDPSLKPLSVSYDQATSLRILNNGHAFNVEFDFSQDKAVLKGGPLDGTYRLIQFHFHWGSLDGQGSEHTVDKKKYAAELHLVHWNTKYGDFGKAVQQPDGLAVLGIFLKVGSAKPGLQKVVDVLDSIKTKGKSADFTNFDPRGLLPESLDYWTYPGSLTTPPLLECVTWIVLKEPISVSSEQVLKFRKLNFNGEGEPEELMFDNWRPAQPLKNRQIKASFK

SEQ ID NO: 210985 - protein, 259 aa, Artificial Sequence
  Description of Artificial Sequence: Synthetic Destabilizing Domain (DD)
SHHWGYGKHNGPEHWHKDFPIAKGERQSPVDIDTHTAKYDPSLKPLSVSYDQATSLRILNNGHAFNVEFDDSQDKAVLKGGPLDGTYRLIQFHFHWGSLDGQGSEHTVDKKKYAAELHLVHWNTKYGDFGKAVQQPDGLAVLGIFLKVGSAKPGLQKVVDVLDSIKTKGKSADFTNFDPRGLLPESLDYWTYPGSLTTPPLLECVTWIVLKEPISVSSEQVLKFRKLNFNGEGEPEELMFDNWRPAQLLKNRQIKASFK

SEQ ID NO: 210986 - protein, 259 aa, Artificial Sequence
  Description of Artificial Sequence: Synthetic Destabilizing Domain (DD)
SHHWGYGKHNGPEHWHKDFPIAKGERQSPVDIDTHTAKYDPSLKPLSVSYDQATSLRILNNGHAFNVEFDFSQDKAVLKGGPLDGTYRLIQFHFHWGSLDGQGSEHTVDKKKYAAELHLVHWNTKYGDFGKAVQQPDGLAVLGIFLKVGSAKPGLQKVVDVLDSIKTKGKSADFTNFDPRGLLPESLDYWTYPGSLTTPPLLECVTWIVLKEPISVSSEQVLKFRKLNFNGEGEPEELMVDNWRPAQLLKNRQIKASFK

SEQ ID NO: 210987 - protein, 259 aa, Artificial Sequence
  Description of Artificial Sequence: Synthetic Destabilizing Domain (DD)
SHHWGYGKHNGPEHWHKDFPIAKGERQSPVDIDTHTAKYDPSLKPLSVSYDQATSLRILNNGHAFNVEFLDSQDKAVLKGGPLDGNYRLIQFHFHWGSLDGQGSEHTVDKKKYAAELHLVHWNTKYGDFGKAVQQPDGLAVLGIFLKVGSAKPGLQKVVDVLDSIKTKGKSADFTNFDPRGLLPESLDYWTYPGSLTTPPLLECVTWIVLKEPISVSSEQVLKFRKLNFNGEGEPEELMVDNWRPAQPLKNRQIKASFK

SEQ ID NO: 210988 - protein, 259 aa, Artificial Sequence
  Description of Artificial Sequence: Synthetic Destabilizing Domain (DD)
SHHWGYGKHNGPEHWHKDFPIAKGERQSPVDIDTHTAKYDPSLKPLSVSYDQATSLRILNNGHAFNVEFLDSQDKAVLKGGPLDGTYRLIQFHFHWGSLDGQGSEHTVDKKKYAAELHLVHWNTKYGDFGKAVQQPDGLAVLGIFLKVGSAKPGLQKVVDVLDSIKTKGKSADFTNFDPRGLLPESLDYWTYPGSLTTPPLLECVTWIVLKEPISVSSEQVLKFRKLNFNGEGEPEELMVDNWRPAQPRKNRQIKASFK

SEQ ID NO: 210989 - protein, 259 aa, Artificial Sequence; identical to SEQ ID NO: 210500
  Description of Artificial Sequence: Synthetic Destabilizing Domain (DD)

SEQ ID NO: 210990 - protein, 259 aa, Artificial Sequence; identical to SEQ ID NO: 210562
  Description of Artificial Sequence: Synthetic Destabilizing Domain (DD)

SEQ ID NO: 210991 - protein, 259 aa, Artificial Sequence; identical to SEQ ID NO: 210518
  Description of Artificial Sequence: Synthetic Destabilizing Domain (DD)

SEQ ID NO: 210992 - protein, 259 aa, Artificial Sequence
  Description of Artificial Sequence: Synthetic Destabilizing Domain (DD)
SHHWGYGKHNGPEHWHKDFPIAKGERQSPVDIDTHTAKYDPSLKPLSVSYDQAKSLRILNNNHAFNVEFDDSQDKAVLKGGPLDGTYRLIQFHFHWGSLDGQGSEHTVDKKKYAAELHLVHWNTKYGDFGKAVQQPDGLAVLGIFLKVGSAKPGLQKVVDVLDSIKTKGKSADFTNFDPRGLLPESLDYWTYPGSLTTPPLLECVTWIVLKEPISVSSEQVLKFRKLNFNGEGEPEELMVDNWRPANPLKNRQIKASFK

SEQ ID NO: 210993 - protein, 259 aa, Artificial Sequence; identical to SEQ ID NO: 210529
  Description of Artificial Sequence: Synthetic Destabilizing Domain (DD)

SEQ ID NO: 210994 - protein, 259 aa, Artificial Sequence; identical to SEQ ID NO: 210507
  Description of Artificial Sequence: Synthetic Destabilizing Domain (DD)

SEQ ID NO: 210995 - protein, 259 aa, Artificial Sequence; identical to SEQ ID NO: 210584
  Description of Artificial Sequence: Synthetic Destabilizing Domain (DD)

SEQ ID NO: 210996 - protein, 259 aa, Artificial Sequence; identical to SEQ ID NO: 210532
  Description of Artificial Sequence: Synthetic Destabilizing Domain (DD)

SEQ ID NO: 210997 - protein, 259 aa, Artificial Sequence; identical to SEQ ID NO: 210580
  Description of Artificial Sequence: Synthetic Destabilizing Domain (DD)

SEQ ID NO: 210998 - protein, 255 aa, Artificial Sequence
  Description of Artificial Sequence: Synthetic Destabilizing Domain (DD)
SHHWGYGKHNGPEHWHKDFPIAKGERQSPVDIDTHTAKYDPSLKPLSVSYDQATSLRILNNGHAFNVEFDDSQDKAVLKGGPLDGTYRLIQFHFHWGSLDGQGSEHTVDKKKYAAELHLVHWNTKYGDFGKAVQQPDGLAVLGIFLKVGSAKPGHQKVVDVLDSIKTKGKSADFTNFDPRGLLPESLDYWTYPGSLTTPPLLECVTWIVLKEPISVSSEQVLKFRKLNFNGEGEPEELMVDNWRPAQPLKNRQIK

SEQ ID NO: 210999 - protein, 255 aa, Artificial Sequence
  Description of Artificial Sequence: Synthetic Destabilizing Domain (DD)
GYGKHNGPEHWHKDFPIAKGERQSPVDIDTHTAKYDPSLKPLSVSYDQATSLRILNNGHAFNVEFDDSQDKAVLKGGPLDGTYRLIQFHFHWGSLDGQGSEHTVDKKKYAAELHLVHWNTKYGDFGKAVQQPDGLAVLGIFLKVGSAKPGHQKVVDVLDSIKTKGKSADFTNFDPRGLLPESLDYWTYPGSLTTPPLLECVTWIVLKEPISVSSEQVLKFRKLNFNGEGEPEELMVDNWRPAQPLKNRQIKASFK

SEQ ID NO: 211000 - protein, 259 aa, Artificial Sequence
  Description of Artificial Sequence: Synthetic Destabilizing Domain (DD)
SHHYGYGKHNGPEHWHKDFPIAKGERQSPVDIDTHTAKYDPSLKPLSVSYDQATSLRILNNGHAFNVEFDDSQDKAVLKGGPLDGTYRLIQFHFHWGSLDGQGSEHTVDKKKYAAELHLVHWNTKYGDFGKAVQQPDGLAVLGIFLKVGSAKPGHQKVVDVLDSIKTKGKSADFTNFDPRGLLPESLDYWTYPGSLTTPPLLECVTWIVLKEPISVSSEQVLKFRKLNFNGEGEPEELMVDNWRPAQPLKNRQIKASFK

SEQ ID NO: 211001 - protein, 256 aa, Artificial Sequence
  Description of Artificial Sequence: Synthetic Destabilizing Domain (DD)
SHHWGYGKHNGPEHWHKDFPIAKGERQSPVDIDTHTAKYDPSLKPLSVSYDQATSLRILNNGHAFNVEFDDSQDKAVLKGGPLDGTYRLIQFHFHWGSLDGQGSEHTVDKKKYAAELHLVHWNTKYGDFGKAVQQPDGLAVLGIFLKVGSAKPGHQKVVDVLDSIKTKGKSADFTNFDPRGLLPESLDYWTYPGSLTTPPLLECVTWIVLKEPISVSSEQVLKFRKLNFNGEEELMVDNWRPAQPLKNRQIKASFK

SEQ ID NO: 211002 - protein, 259 aa, Artificial Sequence
  Description of Artificial Sequence: Synthetic Destabilizing Domain (DD)
SHHWGYGKHNGPEHWHKDFPIAKGERQSPVDIDTHTAKYDPSLKPLSVSYDQATSLRILNNGHAFNVEFDDSQDKAVLKGGPLDGTYRLIQFHFHWGSLDGQGSEHTVDKKKYAAELHLVHWNTKYGDFGKAVQQPDGLAVLGIFLKVGSAKPGHQKVVDVLDSIKTKGKSADFTNFDPRGLLPESLDYWTYPGSLTTPPLLECVTWIVLKEPISVSSEQVLKLRKLNFNGEGEPEELMVDNWRPAQPLKNRQIKASFK

SEQ ID NO: 211003 - protein, 259 aa, Artificial Sequence
  Description of Artificial Sequence: Synthetic Destabilizing Domain (DD)
SHHWGYGKHNGPEHWHKDFPIAKGERQSPVDIDTHTAKYDPSLKPLSVSYDQATSLRILNNGHAFNVEFNDSQNKAVLKGGPLDGTYRLIQFHFHWGSLNGQGSEHTVDKKKYAAELHLVHWNTKYGDFGKAVQQPDGLAVLGIFLKVGSAKPGHQKVVDVLDSIKTKGKSADFTNFDPRGLLPESLDYWTYPGSLTTPPLLECVTWIVLKEPISVSSEQVLKFRKLNFNGEGEPEELMVDNWRPAQPLKNRQIKASFK

SEQ ID NO: 211004 - DNA, 777 bp, Artificial Sequence
  Description of Artificial Sequence: Synthetic Destabilizing Domain (DD)
tcccatcactgggggtacggcaaacacaacggacctgagcactggcataaggacttccccattgccaagggagagcgccagtcccctgttgacatcgacactcatacagccaagtatgacccttccctgaagcccctgtctgtttcctatgatcaagcaacttccctgaggatcctcaacaatggtcatgctttcaacgtggagtttgatgactctcaggacaaagcagtgctcaagggaggacccctggatggcacttacagattgattcagtttcactttcactggggttcacttgatggacaaggttcagaccatactgtggataaaaagaaatatgctgcagaacttcacttggttcactggaacaccaaatatggggattttgggaaagctgtgcagcaacctgatggactggccgttctaggtatttttttgaaggttggcagcgctaaaccgggccttcagaaagttgttgatgtgctggattccattaaaacaaagggcaagagtgctgacttcactaacttcgatcctcgtggcctccttcctgaatccctggattactggacctacccaggctcactgaccacccctcctcttctggaatgtgtgacctggattgtgctcaaggaacccatcagcgtcagcagcgagcaggtgttgaaattccgtaaacttaacttcaatggggagggtgaacccgaagaactgatggtggacaactggcgcccagctcagccactgaagaacaggcaaatcaaagcttccttcaaa

SEQ ID NO: 211005 - DNA, 777 bp, Artificial Sequence; identical to SEQ ID NO: 210848
  Description of Artificial Sequence: Synthetic Destabilizing Domain (DD)

SEQ ID NO: 211006 - DNA, 777 bp, Artificial Sequence; identical to SEQ ID NO: 210761
  Description of Artificial Sequence: Synthetic Destabilizing Domain (DD)

SEQ ID NO: 211007 - DNA, 777 bp, Artificial Sequence; identical to SEQ ID NO: 210757
  Description of Artificial Sequence: Synthetic Destabilizing Domain (DD)

SEQ ID NO: 211008 - DNA, 777 bp, Artificial Sequence; identical to SEQ ID NO: 210850
  Description of Artificial Sequence: Synthetic Destabilizing Domain (DD)

SEQ ID NO: 211009 - DNA, 777 bp, Artificial Sequence; identical to SEQ ID NO: 210703
  Description of Artificial Sequence: Synthetic Destabilizing Domain (DD)

SEQ ID NO: 211010 - DNA, 777 bp, Artificial Sequence
  Description of Artificial Sequence: Synthetic Destabilizing Domain (DD)
tcccatcactgggggtacggcaaacacaacggacctgagcactggcataaggacttccccattgccaagggagagcgccagtcccctgttgacatcgacactcatacagccaagtatgacccttccctgaagcccctgtctgtttcctatgatcaagcaacttccctgaggaacctcaacaatggtcatgctttcaacgtggagtttgatgactctcaggacaaagcagtgctcaagggaggacccctggatggcacttacagattgattcagtttcactttcactggggttcacttgatggacaaggttcagagcatactgtggataaaaagaaatatgctgcagaacttcacttggttcactggaacaccaaatatggggattttgggaaagctgtgcagcaacctgatggactggccgttctaggtatttttttgaaggttggcagcgctaaaccgggccttcagaaagttgttgatgtgctggattccattaaaacaaagggcaagagtgctgacttcactaacttcgatcctcgtggcctccttcctgaatccctggattactggacctacccaggctcactgaccacccctcctcttctggaatgtgtgacctggattgtgctcaaggaacccatcagcgtcagcagcgagcaggtgttgaaattccgtaaacttaacttcaatggggagggtgaacccgaagaactgatggtggacaactggcgcccagctcagccactgaagaacaggcaaatcaaagcttccttcaaa

SEQ ID NO: 211011 - DNA, 777 bp, Artificial Sequence
  Description of Artificial Sequence: Synthetic Destabilizing Domain (DD)
tcccatcactgggggtacggcaaacacaacggacctgagcactggcataaggacttccccattgccaagggagagcgccagtcccctgttgacatcgacactcatacagccaagtatgacccttccctgaagcccctgtctgtttcctatgatcaagcaacttccctgaggatcctcaacaatgatcatgctttcaacgtggagtttgatgactctcaggacaaagcagtgctcaagggaggacccctggatggcacttacagattgattcagtttcactttcactggggttcacttgatggacaaggttcagagcatactgtggataaaaagaaatatgctgcagaacttcacttggttcactggaacaccaaatatggggattttgggaaagctgtgcagcaacctgatggactggccgttctaggtatttttttgaaggttggcagcgctaaaccgggccttcagaaagttgttgatgtgctggattccattaaaacaaagggcaagagtgctgacttcactaacttcgatcctcgtggcctccttcctgaatccctggattactggacctacccaggctcactgaccacccctcctcttctggaatgtgtgacctggattgtgctcaaggaacccatcagcgtcagcagcgagcaggtgttgaaattccgtaaacttaacttcaatggggagggtgaacccgaagaactgatggtggacaactggcgcccagctcagccactgaagaacaggcaaatcaaagcttccttcaaa

SEQ ID NO: 211012 - DNA, 777 bp, Artificial Sequence
  Description of Artificial Sequence: Synthetic Destabilizing Domain (DD)
tcccatcactgggggtacggcaaacacaacggacctgagcactggcataaggacttccccattgccaagggagagcgccagtcccctgttgacatcgacactcatacagccaagtatgacccttccctgaagcccctgtctgtttcctatgatcaagcaacttccctgaggatcctcaacaatggtcatgctttcaacgtggagtttgatgactctcaggacaaagcagtgctcaagggaggacccctggatggcacttacagattgattcagtttcactttcactggggttcacttgatggacaaggttcagagcatactgtggataaaaagaaatatgctgcagaacttcacttggtttactggaacaccaaatatggggattttgggaaagctgtgcagcaacctgatggactggccgttctaggtatttttttgaaggttggcagcgctaaaccgggccttcagaaagttgttgatgtgctggattccattaaaacaaagggcaagagtgctgacttcactaacttcgatcctcgtggcctccttcctgaatccctggattactggacctacccaggctcactgaccacccctcctcttctggaatgtgtgacctggattgtgctcaaggaacccatcagcgtcagcagcgagcaggtgttgaaattccgtaaacttaacttcaatggggagggtgaacccgaagaactgatggtggacaactggcgcccagctcagccactgaagaacaggcaaatcaaagcttccttcaaa

SEQ ID NO: 211013 - DNA, 777 bp, Artificial Sequence
  Description of Artificial Sequence: Synthetic Destabilizing Domain (DD)
tcccatcactgggggtacggcaaacacaacggacctgagcactggcataaggacttccccattgccaagggagagcgccagtcccctgttgacatcgacactcatacagccaagtatgacccttccctgaagcccctgtctgtttcctatgatcaagcaacttccctgaggatcctcaacaatgatcatgctttcaacgtggagtttgatgactctcaggacaaagcagtgctcaagggaggacccctggatggcacttacagattgattcagtttcactttcactggggttcacttgatggacaaggttcagagcatactgtggataaaaagaaatatgctgcagaacttcacttggttcactggaacaccaaatatggggattttgggaaagctgtgcagcaacctgatggactggccgttctaggtatttttttgaaggttggcagcgctaaaccgggccttcagaaagttgttgatgtgctggattccattaaaacaaagggcaagagtgctgacttcactaacttcgatcctcgtggcctccttcctgaatccctggattactggacctacccaggctcactgaccacccctcctcttctggaatgtgtgacctggattgtgctcaaggaacccatcagcgtcagcagcgagcaggtgttgaaattccgtaaacttaacttcaatggggagggtgaacccgaagaactgcttgtggacaactggcgcccagctcagccactgaagaacaggcaaatcaaagcttccttcaaa

SEQ ID NO: 211014 - DNA, 777 bp, Artificial Sequence
  Description of Artificial Sequence: Synthetic Destabilizing Domain (DD)
tcccatcactgggggtacggcaaacacaacggacctgagcactggcataaggacttccccattgccaagggagagcgccagtcccctgttgacatcgacactcatacagccaagtatgacccttccctgaagcccctgtctgtttcctatgatcaagcaacttccctgaggatcctcaacaatggtcatgctttcaacgtggagtttgatgactctcaggacaaaattgtgctcaagggaggacccctggatggcacttacagattgattcagtttcactttcactggggttcacttgatggacaaggttcagagcatactgtggataaaaagaaatatgctgcagaacttcacttggttcactggaacaccaaatatggggattttgggaaagctgtgcagcaacctgatggactggccgttctaggtatttttttgaaggttggcagcgctaaaccgggccttcagaaagttgttgatgtgctggattccattaaaacaaagggcaagagtgctgacttcactaacttcgatcctcgtggcctccttcctgaatccctggattactggacctacccaggctcactgaccacccctcctcttctggaatgtgtgacctggattgtgctcaaggaacccatcagcgtcagcagcgagcaggtgttgaaattccgtaaacttaacttcaatggggagggtgaacccgaagaactgatggtggacaactggcgcccagctcagtttctgaagaacaggcaaatcaaagcttccttcaaa

SEQ ID NO: 211015 - DNA, 777 bp, Artificial Sequence; identical to SEQ ID NO: 210535
  Description of Artificial Sequence: Synthetic Destabilizing Domain (DD)

SEQ ID NO: 211016 - DNA, 777 bp, Artificial Sequence; identical to SEQ ID NO: 210601
  Description of Artificial Sequence: Synthetic Destabilizing Domain (DD)

SEQ ID NO: 211017 - DNA, 777 bp, Artificial Sequence
  Description of Artificial Sequence: Synthetic Destabilizing Domain (DD)
tcccatcactgggggtacggcaaacacaacggacctgagcactggcataaggacttccccattgccaagggagagctccagtcccctgttgacatcgacactcatacagccaagtatgacccttccctgaagcccctgtctgtttcctatgatcaagcaacttccctgaggatcctcaacaatggtcatgctttcaacgtggagtttgatgactctcaggacaaagcagtgctcaagggaggacccctggatggcacttacagattgattcagtttcactttcactggggttcacttgatggacaaggttcagagcatactgtggataaaaagaaatatgctgcagaacttcacttggtttactggaacaccaaatatggggattttgggaaagctgtgcagcaacctgatggactggccgttctaggtatttttttgaaggttggcagcgctaaaccgggccttcagaaagttgttgatgtgctggattccattaaaacaaagggcaagagtgctgacttcactaacttcgatcctcgtggcctccttcctgaatccctggattactggacctacccaggctcactgaccacccctcctcttctggaatgtgtgacctggattgtgctcaaggaacccatcagcgtcagcagcgagcaggtgttgaaattccgtaaacttaacttcaatggggagggtgaacccgaagaactgatggtggacaactggcgcccagctcagccactgaagaacaggcaaatcaaagcttccttcaaa

SEQ ID NO: 211018 - DNA, 777 bp, Artificial Sequence
  Description of Artificial Sequence: Synthetic Destabilizing Domain (DD)
tcccatcactgggggtacggcaaacacaacggacctgagcactggcataaggacttccccattgccaagggagagcgccagtcccctgttgacatcgacactcatacagccaagtatgacccttccctgaagcccctgtctgtttcctatgatcaagcaacttccctgaggatcctcaacaatggtcatgctttcaacgtggagtttgatgactctcaggacaaagcagtgctcaagggaggacccctggatggcatttacagattgattcagtttcactttcactggggttcacttgatggacaaggttcagagcatactgtggataaaaagaaatatgctgcagaacttcacttggtttactggaacaccaaatatggggattttgggaaagctgtgcagcaacctgatggactggccgttctaggtatttttttgaaggttggcagcgctaaaccgggccttcagaaagttgttgatgtgctggattccattaaaacaaagggcaagagtgctgacttcactaacttcgatcctcgtggcctccttcctgaatccctggattactggacctacccaggctcactgaccacccctcctcttctggaatgtgtgacctggattgtgctcaaggaacccatcagcgtcagcagcgagcaggtgttgaaattccgtaaacttaacttcaatggggagggtgaacccgaagaactgatggtggacaactggcgcccagctcagccactgaagaacaggcaaatcaaagcttccttcaaa

SEQ ID NO: 211019 - DNA, 777 bp, Artificial Sequence
  Description of Artificial Sequence: Synthetic Destabilizing Domain (DD)
tcccatcactgggggtacggcaaacacaacggacctgagcactggcataaggacttccccattgccaagggagagcgccagtcccctgttgacatcgacactcatacagccaagtatgacccttccctgaagcccctgtctgtttcctatgatcaagcaacttccctgaggatcctcaacaatggtcatgctttcaacgtggagtttgatgactctcaggacaaagcagtgctcaagggaggacccctggatggcacttacagattgattcagtttcactttcactggggttcacttgatggacaaggttcagagcatactgtggataaaaagaaatatgctgcagaacttcacttggtttactggaacaccaaatatggggattttgggaaagctgtgcagcaacctgatggactggccgttctaggtatttttttgaaggttggcagcgctaaaccgggccttcagaaagttgttgatgtgctggattccattaaaacaaagggcaagagtgctgacttcactaacttcgatcctcgtggcctccttcctgaatccctggattactggacctacccaggctcactgaccacccctcctcttctggaatgtgtgacctggattgtgctcaaggaacccatcagcgtcagcagcgagcaggtgttgaaattccgtaaacttaacttcaatggggagggtgaacccgaagaactgatggtggacaactggcgcccagctcagccactgaaggacaggcaaatcaaagcttccttcaaa

SEQ ID NO: 211020 - DNA, 777 bp, Artificial Sequence
  Description of Artificial Sequence: Synthetic Destabilizing Domain (DD)
tcccatcactgggggtacggcaaacacaacggacctgagcactggcataaggacttccccattgccaagggagagcgccagtcccctgttgacatcgacactcatacagccaagtatgacccttccctgaagcccctgtctgtttcctatgatcaagcaacttccctgaggatcctcaacaatggtcatgctttcaacgtggagtttgatttctctcaggacaaagcagtgctcaagggaggacccctggatggcacttacagattgattcagtttcactttcactggggttcacttgatggacaaggttcagagcatactgtggataaaaagaaatatgctgcagaacttcacttggttcactggaacaccaaatatggggattttgggaaagctgtgcagcaacctgatggactggccgttctaggtatttttttgaaggttggcagcgctaaaccgggccttcagaaagttgttgatgtgctggattccattaaaacaaagggcaagagtgctgacttcactaacttcgatcctcgtggcctccttcctgaatccctggattactggacctacccaggctcactgaccacccctcctcttctggaatgtgtgacctggattgtgctcaaggaacccatcagcgtcagcagcgagcaggtgttgaaattccgtaaacttaacttcaatggggagggtgaacccgaagaactgatgtttgacaactggcgcccagctcagccactgaagaacaggcaaatcaaagcttccttcaaa

SEQ ID NO: 211021 - DNA, 777 bp, Artificial Sequence
  Description of Artificial Sequence: Synthetic Destabilizing Domain (DD)
tcccatcactgggggtacggcaaacacaacggacctgagcactggcataaggacttccccattgccaagggagagcgccagtcccctgttgacatcgacactcatacagccaagtatgacccttccctgaagcccctgtctgtttcctatgatcaagcaacttccctgaggatcctcaacaatggtcatgctttcaacgtggagtttgatgactctcaggacaaagcagtgctcaagggaggacccctggatggcacttacagattgattcagtttcactttcactggggttcacttgatggacaaggttcagagcatactgtggataaaaagaaatatgctgcagaacttcacttggttcactggaacaccaaatatggggattttgggaaagctgtgcagcaacctgatggactggccgttctaggtatttttttgaaggttggcagcgctaaaccgggccttcagaaagttgttgatgtgctggattccattaaaacaaagggcaagagtgctgacttcactaacttcgatcctcgtggcctccttcctgaatccctggattactggacctacccaggctcactgaccacccctcctcttctggaatgtgtgacctggattgtgctcaaggaacccatcagcgtcagcagcgagcaggtgttgaaattccgtaaacttaacttcaatggggagggtgaacccgaagaactgatgtttgacaactggcgcccagctcagctactgaagaacaggcaaatcaaagcttccttcaaa

SEQ ID NO: 211022 - DNA, 777 bp, Artificial Sequence
  Description of Artificial Sequence: Synthetic Destabilizing Domain (DD)
tcccatcactgggggtacggcaaacacaacggacctgagcactggcataaggacttccccattgccaagggagagcgccagtcccctgttgacatcgacactcatacagccaagtatgacccttccctgaagcccctgtctgtttcctatgatcaagcaacttccctgaggatcctcaacaatggtcatgctttcaacgtggagtttgatttctctcaggacaaagcagtgctcaagggaggacccctggatggcacttacagattgattcagtttcactttcactggggttcacttgatggacaaggttcagagcatactgtggataaaaagaaatatgctgcagaacttcacttggttcactggaacaccaaatatggggattttgggaaagctgtgcagcaacctgatggactggccgttctaggtatttttttgaaggttggcagcgctaaaccgggccttcagaaagttgttgatgtgctggattccattaaaacaaagggcaagagtgctgacttcactaacttcgatcctcgtggcctccttcctgaatccctggattactggacctacccaggctcactgaccacccctcctcttctggaatgtgtgacctggattgtgctcaaggaacccatcagcgtcagcagcgagcaggtgttgaaattccgtaaacttaacttcaatggggagggtgaacccgaagaactgatggtggacaactggcgcccagctcagctactgaagaacaggcaaatcaaagcttccttcaaa

SEQ ID NO: 211023 - DNA, 777 bp, Artificial Sequence
  Description of Artificial Sequence: Synthetic Destabilizing Domain (DD)
tcccatcactgggggtacggcaaacacaacggacctgagcactggcataaggacttccccattgccaagggagagcgccagtcccctgttgacatcgacactcatacagccaagtatgacccttccctgaagcccctgtctgtttcctatgatcaagcaacttccctgaggatcctcaacaatggtcatgctttcaacgtggagtttcttgactctcaggacaaagcagtgctcaagggaggacccctggatggcaattacagattgattcagtttcactttcactggggttcacttgatggacaaggttcagagcatactgtggataaaaagaaatatgctgcagaacttcacttggttcactggaacaccaaatatggggattttgggaaagctgtgcagcaacctgatggactggccgttctaggtatttttttgaaggttggcagcgctaaaccgggccttcagaaagttgttgatgtgctggattccattaaaacaaagggcaagagtgctgacttcactaacttcgatcctcgtggcctccttcctgaatccctggattactggacctacccaggctcactgaccacccctcctcttctggaatgtgtgacctggattgtgctcaaggaacccatcagcgtcagcagcgagcaggtgttgaaattccgtaaacttaacttcaatggggagggtgaacccgaagaactgatggtggacaactggcgcccagctcagccactgaagaacaggcaaatcaaagcttccttcaaa

SEQ ID NO: 211024 - DNA, 777 bp, Artificial Sequence
  Description of Artificial Sequence: Synthetic Destabilizing Domain (DD)
tcccatcactgggggtacggcaaacacaacggacctgagcactggcataaggacttccccattgccaagggagagcgccagtcccctgttgacatcgacactcatacagccaagtatgacccttccctgaagcccctgtctgtttcctatgatcaagcaacttccctgaggatcctcaacaatggtcatgctttcaacgtggagtttcttgactctcaggacaaagcagtgctcaagggaggacccctggatggcacttacagattgattcagtttcactttcactggggttcacttgatggacaaggttcagagcatactgtggataaaaagaaatatgctgcagaacttcacttggttcactggaacaccaaatatggggattttgggaaagctgtgcagcaacctgatggactggccgttctaggtatttttttgaaggttggcagcgctaaaccgggccttcagaaagttgttgatgtgctggattccattaaaacaaagggcaagagtgctgacttcactaacttcgatcctcgtggcctccttcctgaatccctggattactggacctacccaggctcactgaccacccctcctcttctggaatgtgtgacctggattgtgctcaaggaacccatcagcgtcagcagcgagcaggtgttgaaattccgtaaacttaacttcaatggggagggtgaacccgaagaactgatggtggacaactggcgcccagctcagccacggaagaacaggcaaatcaaagcttccttcaaa

SEQ ID NO: 211025 - DNA, 777 bp, Artificial Sequence; identical to SEQ ID NO: 210502
  Description of Artificial Sequence: Synthetic Destabilizing Domain (DD)

SEQ ID NO: 211026 - DNA, 777 bp, Artificial Sequence; identical to SEQ ID NO: 210563
  Description of Artificial Sequence: Synthetic Destabilizing Domain (DD)

SEQ ID NO: 211027 - DNA, 777 bp, Artificial Sequence; identical to SEQ ID NO: 210519
  Description of Artificial Sequence: Synthetic Destabilizing Domain (DD)

SEQ ID NO: 211028 - DNA, 777 bp, Artificial Sequence
  Description of Artificial Sequence: Synthetic Destabilizing Domain (DD)
tcccatcactgggggtacggcaaacacaacggacctgagcactggcataaggacttccccattgccaagggagagcgccagtcccctgttgacatcgacactcatacagccaagtatgacccttccctgaagcccctgtctgtttcctatgatcaagcaaagtccctgaggatcctcaacaataatcatgctttcaacgtggagtttgatgactctcaggacaaagcagtgctcaagggaggacccctggatggcacttacagattgattcagtttcactttcactggggttcacttgatggacaaggttcagagcatactgtggataaaaagaaatatgctgcagaacttcacttggttcactggaacaccaaatatggggattttgggaaagctgtgcagcaacctgatggactggccgttctaggtatttttttgaaggttggcagcgctaaaccgggccttcagaaagttgttgatgtgctggattccattaaaacaaagggcaagagtgctgacttcactaacttcgatcctcgtggcctccttcctgaatccctggattactggacctacccaggctcactgaccacccctcctcttctggaatgtgtgacctggattgtgctcaaggaacccatcagcgtcagcagcgagcaggtgttgaaattccgtaaacttaacttcaatggggagggtgaacccgaagaactgatggtggacaactggcgcccagctaatccactgaagaacaggcaaatcaaagcttccttcaaa

SEQ ID NO: 211029 - DNA, 777 bp, Artificial Sequence; identical to SEQ ID NO: 210530
  Description of Artificial Sequence: Synthetic Destabilizing Domain (DD)

SEQ ID NO: 211030 - DNA, 777 bp, Artificial Sequence; identical to SEQ ID NO: 210509
  Description of Artificial Sequence: Synthetic Destabilizing Domain (DD)

SEQ ID NO: 211031 - DNA, 777 bp, Artificial Sequence; identical to SEQ ID NO: 210585
  Description of Artificial Sequence: Synthetic Destabilizing Domain (DD)

SEQ ID NO: 211032 - DNA, 777 bp, Artificial Sequence; identical to SEQ ID NO: 210533
  Description of Artificial Sequence: Synthetic Destabilizing Domain (DD)

SEQ ID NO: 211033 - DNA, 777 bp, Artificial Sequence; identical to SEQ ID NO: 210581
  Description of Artificial Sequence: Synthetic Destabilizing Domain (DD)

SEQ ID NO: 211034 - DNA, 765 bp, Artificial Sequence
  Description of Artificial Sequence: Synthetic Destabilizing Domain (DD)
tcccatcactgggggtacggcaaacacaacggacctgagcactggcataaggacttccccattgccaagggagagcgccagtcccctgttgacatcgacactcatacagccaagtatgacccttccctgaagcccctgtctgtttcctatgatcaagcaacttccctgaggatcctcaacaatggtcatgctttcaacgtggagtttgatgactctcaggacaaagcagtgctcaagggaggacccctggatggcacttacagattgattcagtttcactttcactggggttcacttgatggacaaggttcagagcatactgtggataaaaagaaatatgctgcagaacttcacttggttcactggaacaccaaatatggggattttgggaaagctgtgcagcaacctgatggactggccgttctaggtatttttttgaaggttggcagcgctaaaccgggccatcagaaagttgttgatgtgctggattccattaaaacaaagggcaagagtgctgacttcactaacttcgatcctcgtggcctccttcctgaatccctggattactggacctacccaggctcactgaccacccctcctcttctggaatgtgtgacctggattgtgctcaaggaacccatcagcgtcagcagcgagcaggtgttgaaattccgtaaacttaacttcaatggggagggtgaacccgaagaactgatggtggacaactggcgcccagctcagccactgaagaacaggcaaatcaaa

SEQ ID NO: 211035 - DNA, 765 bp, Artificial Sequence
  Description of Artificial Sequence: Synthetic Destabilizing Domain (DD)
gggtacggcaaacacaacggacctgagcactggcataaggacttccccattgccaagggagagcgccagtcccctgttgacatcgacactcatacagccaagtatgacccttccctgaagcccctgtctgtttcctatgatcaagcaacttccctgaggatcctcaacaatggtcatgctttcaacgtggagtttgatgactctcaggacaaagcagtgctcaagggaggacccctggatggcacttacagattgattcagtttcactttcactggggttcacttgatggacaaggttcagagcatactgtggataaaaagaaatatgctgcagaacttcacttggttcactggaacaccaaatatggggattttgggaaagctgtgcagcaacctgatggactggccgttctaggtatttttttgaaggttggcagcgctaaaccgggccatcagaaagttgttgatgtgctggattccattaaaacaaagggcaagagtgctgacttcactaacttcgatcctcgtggcctccttcctgaatccctggattactggacctacccaggctcactgaccacccctcctcttctggaatgtgtgacctggattgtgctcaaggaacccatcagcgtcagcagcgagcaggtgttgaaattccgtaaacttaacttcaatggggagggtgaacccgaagaactgatggtggacaactggcgcccagctcagccactgaagaacaggcaaatcaaagcttccttcaaa

SEQ ID NO: 211036 - DNA, 777 bp, Artificial Sequence
  Description of Artificial Sequence: Synthetic Destabilizing Domain (DD)
tcccatcactacgggtacggcaaacacaacggacctgagcactggcataaggacttccccattgccaagggagagcgccagtcccctgttgacatcgacactcatacagccaagtatgacccttccctgaagcccctgtctgtttcctatgatcaagcaacttccctgaggatcctcaacaatggtcatgctttcaacgtggagtttgatgactctcaggacaaagcagtgctcaagggaggacccctggatggcacttacagattgattcagtttcactttcactggggttcacttgatggacaaggttcagagcatactgtggataaaaagaaatatgctgcagaacttcacttggttcactggaacaccaaatatggggattttgggaaagctgtgcagcaacctgatggactggccgttctaggtatttttttgaaggttggcagcgctaaaccgggccatcagaaagttgttgatgtgctggattccattaaaacaaagggcaagagtgctgacttcactaacttcgatcctcgtggcctccttcctgaatccctggattactggacctacccaggctcactgaccacccctcctcttctggaatgtgtgacctggattgtgctcaaggaacccatcagcgtcagcagcgagcaggtgttgaaattccgtaaacttaacttcaatggggagggtgaacccgaagaactgatggtggacaactggcgcccagctcagccactgaagaacaggcaaatcaaagcttccttcaaa

SEQ ID NO: 211037 - DNA, 768 bp, Artificial Sequence
  Description of Artificial Sequence: Synthetic Destabilizing Domain (DD)
tcccatcactgggggtacggcaaacacaacggacctgagcactggcataaggacttccccattgccaagggagagcgccagtcccctgttgacatcgacactcatacagccaagtatgacccttccctgaagcccctgtctgtttcctatgatcaagcaacttccctgaggatcctcaacaatggtcatgctttcaacgtggagtttgatgactctcaggacaaagcagtgctcaagggaggacccctggatggcacttacagattgattcagtttcactttcactggggttcacttgatggacaaggttcagagcatactgtggataaaaagaaatatgctgcagaacttcacttggttcactggaacaccaaatatggggattttgggaaagctgtgcagcaacctgatggactggccgttctaggtatttttttgaaggttggcagcgctaaaccgggccatcagaaagttgttgatgtgctggattccattaaaacaaagggcaagagtgctgacttcactaacttcgatcctcgtggcctccttcctgaatccctggattactggacctacccaggctcactgaccacccctcctcttctggaatgtgtgacctggattgtgctcaaggaacccatcagcgtcagcagcgagcaggtgttgaaattccgtaaacttaacttcaatggggaggaagaactgatggtggacaactggcgcccagctcagccactgaagaacaggcaaatcaaagcttccttcaaa

SEQ ID NO: 211038 - DNA, 777 bp, Artificial Sequence
  Description of Artificial Sequence: Synthetic Destabilizing Domain (DD)
tcccatcactgggggtacggcaaacacaacggacctgagcactggcataaggacttccccattgccaagggagagcgccagtcccctgttgacatcgacactcatacagccaagtatgacccttccctgaagcccctgtctgtttcctatgatcaagcaacttccctgaggatcctcaacaatggtcatgctttcaacgtggagtttgatgactctcaggacaaagcagtgctcaagggaggacccctggatggcacttacagattgattcagtttcactttcactggggttcacttgatggacaaggttcagagcatactgtggataaaaagaaatatgctgcagaacttcacttggttcactggaacaccaaatatggggattttgggaaagctgtgcagcaacctgatggactggccgttctaggtatttttttgaaggttggcagcgctaaaccgggccatcagaaagttgttgatgtgctggattccattaaaacaaagggcaagagtgctgacttcactaacttcgatcctcgtggcctccttcctgaatccctggattactggacctacccaggctcactgaccacccctcctcttctggaatgtgtgacctggattgtgctcaaggaacccatcagcgtcagcagcgagcaggtgttgaaactccgtaaacttaacttcaatggggagggtgaacccgaagaactgatggtggacaactggcgcccagctcagccactgaagaacaggcaaatcaaagcttccttcaaa

SEQ ID NO: 211039 - DNA, 777 bp, Artificial Sequence
  Description of Artificial Sequence: Synthetic Destabilizing Domain (DD)
tcccatcactgggggtacggcaaacacaacggacctgagcactggcataaggacttccccattgccaagggagagcgccagtcccctgttgacatcgacactcatacagccaagtatgacccttccctgaagcccctgtctgtttcctatgatcaagcaacttccctgaggatcctcaacaatggtcatgctttcaacgtggagtttaatgactctcagaacaaagcagtgctcaagggaggacccctggatggcacttacagattgattcagtttcactttcactggggttcacttaatggacaaggttcagagcatactgtggataaaaagaaatatgctgcagaacttcacttggttcactggaacaccaaatatggggattttgggaaagctgtgcagcaacctgatggactggccgttctaggtatttttttgaaggttggcagcgctaaaccgggccatcagaaagttgttgatgtgctggattccattaaaacaaagggcaagagtgctgacttcactaacttcgatcctcgtggcctccttcctgaatccctggattactggacctacccaggctcactgaccacccctcctcttctggaatgtgtgacctggattgtgctcaaggaacccatcagcgtcagcagcgagcaggtgttgaaattccgtaaacttaacttcaatggggagggtgaacccgaagaactgatggtggacaactggcgcccagctcagccactgaagaacaggcaaatcaaagcttccttcaaa

SEQ ID NO: 211040 - protein, 501 aa, Artificial Sequence
  Description of Artificial Sequence: Synthetic Construct
MVSKGAELFTGIVPILIELNGDVNGHKFSVSGEGEGDATYGKLTLKFICTTGKLPVPWPTLVTTLSYGVQCFSRYPDHMKQHDFFKSAMPEGYIQERTIFFEDDGNYKSRAEVKFEGDTLVNRIELTGTDFKEDGNILGNKMEYNYNAHNVYIMTDKAKNGIKVNFKIRHNIEDGSVQLADHYQQNTPIGDGPVLLPDNHYLSTQSALSKDPNEKRDHMIYFGFVTAAAITHGMDELYKGSGSHHWGYGKHNGPEHWHKDFPIAKGERQSPVDIDTHTAKYDPSLKPLSVSYDQATSLRILNNGHAFNVEFDDSQDKAVLKGGPLDGTYRLIQFHFHWGSLDGQGSDHTVDKKKYAAELHLVHWNTKYGDFGKAVQQPDGLAVLGIFLKVGSAKPGLQKVVDVLDSIKTKGKSADFTNFDPRGLLPESLDYWTYPGSLTTPPLLECVTWIVLKEPISVSSEQVLKFRKLNFNGEGEPEELMVDNWRPAQPLKNRQIKASFK

SEQ ID NO: 211041 - protein, 501 aa, Artificial Sequence
  Description of Artificial Sequence: Synthetic Construct
MVSKGAELFTGIVPILIELNGDVNGHKFSVSGEGEGDATYGKLTLKFICTTGKLPVPWPTLVTTLSYGVQCFSRYPDHMKQHDFFKSAMPEGYIQERTIFFEDDGNYKSRAEVKFEGDTLVNRIELTGTDFKEDGNILGNKMEYNYNAHNVYIMTDKAKNGIKVNFKIRHNIEDGSVQLADHYQQNTPIGDGPVLLPDNHYLSTQSALSKDPNEKRDHMIYFGFVTAAAITHGMDELYKGSGSHHWGYGKHNGPEHWHKDFPIAKGERQSPVDIDTHTAKYDPSLKPLSVSYDQATSLRNLNNGHAFNVEFDDSQDKAVLKGGPLDGTYRLIQFHFHWGSLDRQGSEHTVDKKKYAAELHLVHWNTKYGDFGKAVQQPDGLAVLGIFLKVGSAKPGLQKVVDVLDSIKTKGKSADFTNFDPRGLLPESLDYWTYPGSLTTPPLLECVTWIVLKEPISVSSEQVLKFRKLNFNGEGEPEELMVDNWRPAQPLKNRQIKASFK

SEQ ID NO: 211042 - protein, 501 aa, Artificial Sequence
  Description of Artificial Sequence: Synthetic Construct
MVSKGAELFTGIVPILIELNGDVNGHKFSVSGEGEGDATYGKLTLKFICTTGKLPVPWPTLVTTLSYGVQCFSRYPDHMKQHDFFKSAMPEGYIQERTIFFEDDGNYKSRAEVKFEGDTLVNRIELTGTDFKEDGNILGNKMEYNYNAHNVYIMTDKAKNGIKVNFKIRHNIEDGSVQLADHYQQNTPIGDGPVLLPDNHYLSTQSALSKDPNEKRDHMIYFGFVTAAAITHGMDELYKGSGSHHWGYGKHNGPEHWHKDFPIAKGERQSPVDIDTHTAKYDPSLKPLSVSYDQATSLRILNNGHAFNVEFDDSQDKAVLKGGPLDGTYRLIQFHFHWGSLDGQGSEHTVDKKKYAAELHLVHWNTKYGDFGKAVQQPDGLAVLGIFLKVGSAKPGLQKVVDVLDSIKTKGKSADFTNFDPRGLLPESLDYWTYPGSPTTPPLLECVTWIVLKEPISVSSEQVLKFRKLNFNGEGEPEELMVDNWRPAQPLKNRQIKASFK

SEQ ID NO: 211043 - protein, 501 aa, Artificial Sequence
  Description of Artificial Sequence: Synthetic Construct
MVSKGAELFTGIVPILIELNGDVNGHKFSVSGEGEGDATYGKLTLKFICTTGKLPVPWPTLVTTLSYGVQCFSRYPDHMKQHDFFKSAMPEGYIQERTIFFEDDGNYKSRAEVKFEGDTLVNRIELTGTDFKEDGNILGNKMEYNYNAHNVYIMTDKAKNGIKVNFKIRHNIEDGSVQLADHYQQNTPIGDGPVLLPDNHYLSTQSALSKDPNEKRDHMIYFGFVTAAAITHGMDELYKGSGSHHWGYGKHNGPEHWHKDFPIAKGERQSPVDIDTHTAKYDPSLKPLSVSYDQATSLRILNNGHAFNVEFDDSQDKAVLKGGPLDGTYRLIQFHFHWGSLDGQGSEHTVDKKKYAAELHLVHWNTKYGDFGKAVQQPDGLAVLGIFLKVGSAKPGHQKVVDVLDSIKTKGKCADFTNYDPRGLLPDSLDYWTYPGSLTTPPLLECVTWIVLKEPISVSSEQVLKFRKLNFNGEGEPEELMVDNWRPAQPLKNRQIKASFK

SEQ ID NO: 211044 - protein, 501 aa, Artificial Sequence
  Description of Artificial Sequence: Synthetic Construct
MVSKGAELFTGIVPILIELNGDVNGHKFSVSGEGEGDATYGKLTLKFICTTGKLPVPWPTLVTTLSYGVQCFSRYPDHMKQHDFFKSAMPEGYIQERTIFFEDDGNYKSRAEVKFEGDTLVNRIELTGTDFKEDGNILGNKMEYNYNAHNVYIMTDKAKNGIKVNFKIRHNIEDGSVQLADHYQQNTPIGDGPVLLPDNHYLSTQSALSKDPNEKRDHMIYFGFVTAAAITHGMDELYKGSGSHHWGYGKHNGPEHWHKDFPIAKGERQSPVDIDTHTAKYDPSLKPLSVSYDQATSLRILNNGHAFNVEFDDSQDKAVLKGGPLDGTYRLIQFHFHWGSLDGQGSEHTVDKKKYAAELHLVHWNTKYGDFGKAVQQPDGLAVLGIFLKVGSAKPGHQKVVDVLDSIKTKGKSADFTNFDPRGLLPESLDYWTYPGSLTTPPLLECVTWIVLKEPISVSSEQVLKFRKLNFNGEGEPEELMVDNWRPAQPLKNRQIKASFK

SEQ ID NO: 211045 - protein, 501 aa, Artificial Sequence
  Description of Artificial Sequence: Synthetic Construct
MVSKGAELFTGIVPILIELNGDVNGHKFSVSGEGEGDATYGKLTLKFICTTGKLPVPWPTLVTTLSYGVQCFSRYPDHMKQHDFFKSAMPEGYIQERTIFFEDDGNYKSRAEVKFEGDTLVNRIELTGTDFKEDGNILGNKMEYNYNAHNVYIMTDKAKNGIKVNFKIRHNIEDGSVQLADHYQQNTPIGDGPVLLPDNHYLSTQSALSKDPNEKRDHMIYFGFVTAAAITHGMDELYKGSGSHHWGYGKHNGPEHWHKDFPIAKGELQSPVDIDTHTAKYDPSLKPLSVSYDQATSLRILNNGHAFNVEFDDSQDKAVLKGGPLDGIYRLIQFHFHWGSLDGQGSEHTVDKKKYAAELHLVYWNTKYGDFGKAVQQPDGLAVLGIFLKVGSAKPGLQKVVDVLDSIKTKGKSADFTNFDPRGLLPESLDYWTYPGSLTTPPLLECVTWIVLKEPISVSSEQVLKFRKLNFNGEGEPEELMVDNWRPAQPLKDRQIKASFK

SEQ ID NO: 211046 - protein, 758 aa, Artificial Sequence
  Description of Artificial Sequence: Synthetic Construct
MVSKGAELFTGIVPILIELNGDVNGHKFSVSGEGEGDATYGKLTLKFICTTGKLPVPWPTLVTTLSYGVQCFSRYPDHMKQHDFFKSAMPEGYIQERTIFFEDDGNYKSRAEVKFEGDTLVNRIELTGTDFKEDGNILGNKMEYNYNAHNVYIMTDKAKNGIKVNFKIRHNIEDGSVQLADHYQQNTPIGDGPVLLPDNHYLSTQSALSKDPNEKRDHMIYFGFVTAAAITHGMDELYKGSSHHWGYGKHNGPEHWHKDFPIAKGERQSPVDIDTHTAKYDPSLKPLSVSYDQATSLRNLNNGHAFNVEFDDSQDKAVLKGGPLDGTYRLIQFHFHWGSLDGQGSEHTVDKKKYAAELHLVHWNTKYGDFGKAVQQPDGLAVLGIFLKVGSAKPGLQKVVDVLDSIKTKGKSADFTNFDPRGLLPESLDYWTYPGSLTTPPLLECVTWIVLKEPISVSSEQVLKFRKLNFNGEGEPEELMVDNWRPAQPLKNRQIKASFKSLDGATNFSLLKQAGDVEENPGPLSKGEEDNMAIIKEFMRFKVHMEGSVNGHEFEIEGEGEGRPYEGTQTAKLKVTKGGPLPFAWDILSPQFMYGSKAYVKHPADIPDYLKLSFPEGFKWERVMNFEDGGVVTVTQDSSLQDGEFIYKVKLRGTNFPSDGPVMQKKTMGWEASSERMYPEDGALKGEIKQRLKLKDGGHYDAEVKTTYKAKKPVQLPGAYNVNIKLDITSHNEDYTIVEQYERAEGRHSTGGMDELYK

SEQ ID NO: 211047 - protein, 758 aa, Artificial Sequence
  Description of Artificial Sequence: Synthetic Construct
MVSKGAELFTGIVPILIELNGDVNGHKFSVSGEGEGDATYGKLTLKFICTTGKLPVPWPTLVTTLSYGVQCFSRYPDHMKQHDFFKSAMPEGYIQERTIFFEDDGNYKSRAEVKFEGDTLVNRIELTGTDFKEDGNILGNKMEYNYNAHNVYIMTDKAKNGIKVNFKIRHNIEDGSVQLADHYQQNTPIGDGPVLLPDNHYLSTQSALSKDPNEKRDHMIYFGFVTAAAITHGMDELYKGSSHHWGYGKHNGPEHWHKDFPIAKGERQSPVDIDTHTAKYDPSLKPLSVSYDQATSLRILNNDHAFNVEFDDSQDKAVLKGGPLDGTYRLIQFHFHWGSLDGQGSEHTVDKKKYAAELHLVHWNTKYGDFGKAVQQPDGLAVLGIFLKVGSAKPGLQKVVDVLDSIKTKGKSADFTNFDPRGLLPESLDYWTYPGSLTTPPLLECVTWIVLKEPISVSSEQVLKFRKLNFNGEGEPEELMVDNWRPAQPLKNRQIKASFKSLDGATNFSLLKQAGDVEENPGPLSKGEEDNMAIIKEFMRFKVHMEGSVNGHEFEIEGEGEGRPYEGTQTAKLKVTKGGPLPFAWDILSPQFMYGSKAYVKHPADIPDYLKLSFPEGFKWERVMNFEDGGVVTVTQDSSLQDGEFIYKVKLRGTNFPSDGPVMQKKTMGWEASSERMYPEDGALKGEIKQRLKLKDGGHYDAEVKTTYKAKKPVQLPGAYNVNIKLDITSHNEDYTIVEQYERAEGRHSTGGMDELYK

SEQ ID NO: 211048 - protein, 758 aa, Artificial Sequence
  Description of Artificial Sequence: Synthetic Construct
MVSKGAELFTGIVPILIELNGDVNGHKFSVSGEGEGDATYGKLTLKFICTTGKLPVPWPTLVTTLSYGVQCFSRYPDHMKQHDFFKSAMPEGYIQERTIFFEDDGNYKSRAEVKFEGDTLVNRIELTGTDFKEDGNILGNKMEYNYNAHNVYIMTDKAKNGIKVNFKIRHNIEDGSVQLADHYQQNTPIGDGPVLLPDNHYLSTQSALSKDPNEKRDHMIYFGFVTAAAITHGMDELYKGSSHHWGYGKHNGPEHWHKDFPIAKGERQSPVDIDTHTAKYDPSLKPLSVSYDQATSLRILNNGHAFNVEFDDSQDKAVLKGGPLDGTYRLIQFHFHWGSLDGQGSEHTVDKKKYAAELHLVYWNTKYGDFGKAVQQPDGLAVLGIFLKVGSAKPGLQKVVDVLDSIKTKGKSADFTNFDPRGLLPESLDYWTYPGSLTTPPLLECVTWIVLKEPISVSSEQVLKFRKLNFNGEGEPEELMVDNWRPAQPLKNRQIKASFKSLDGATNFSLLKQAGDVEENPGPLSKGEEDNMAIIKEFMRFKVHMEGSVNGHEFEIEGEGEGRPYEGTQTAKLKVTKGGPLPFAWDILSPQFMYGSKAYVKHPADIPDYLKLSFPEGFKWERVMNFEDGGVVTVTQDSSLQDGEFIYKVKLRGTNFPSDGPVMQKKTMGWEASSERMYPEDGALKGEIKQRLKLKDGGHYDAEVKTTYKAKKPVQLPGAYNVNIKLDITSHNEDYTIVEQYERAEGRHSTGGMDELYK

SEQ ID NO: 211049 - protein, 758 aa, Artificial Sequence
  Description of Artificial Sequence: Synthetic Construct
MVSKGAELFTGIVPILIELNGDVNGHKFSVSGEGEGDATYGKLTLKFICTTGKLPVPWPTLVTTLSYGVQCFSRYPDHMKQHDFFKSAMPEGYIQERTIFFEDDGNYKSRAEVKFEGDTLVNRIELTGTDFKEDGNILGNKMEYNYNAHNVYIMTDKAKNGIKVNFKIRHNIEDGSVQLADHYQQNTPIGDGPVLLPDNHYLSTQSALSKDPNEKRDHMIYFGFVTAAAITHGMDELYKGSSHHWGYGKHNGPEHWHKDFPIAKGERQSPVDIDTHTAKYDPSLKPLSVSYDQATSLRILNNDHAFNVEFDDSQDKAVLKGGPLDGTYRLIQFHFHWGSLDGQGSEHTVDKKKYAAELHLVHWNTKYGDFGKAVQQPDGLAVLGIFLKVGSAKPGLQKVVDVLDSIKTKGKSADFTNFDPRGLLPESLDYWTYPGSLTTPPLLECVTWIVLKEPISVSSEQVLKFRKLNFNGEGEPEELLVDNWRPAQPLKNRQIKASFKSLDGATNFSLLKQAGDVEENPGPLSKGEEDNMAIIKEFMRFKVHMEGSVNGHEFEIEGEGEGRPYEGTQTAKLKVTKGGPLPFAWDILSPQFMYGSKAYVKHPADIPDYLKLSFPEGFKWERVMNFEDGGVVTVTQDSSLQDGEFIYKVKLRGTNFPSDGPVMQKKTMGWEASSERMYPEDGALKGEIKQRLKLKDGGHYDAEVKTTYKAKKPVQLPGAYNVNIKLDITSHNEDYTIVEQYERAEGRHSTGGMDELYK

SEQ ID NO: 211050 - protein, 758 aa, Artificial Sequence
  Description of Artificial Sequence: Synthetic Construct
MVSKGAELFTGIVPILIELNGDVNGHKFSVSGEGEGDATYGKLTLKFICTTGKLPVPWPTLVTTLSYGVQCFSRYPDHMKQHDFFKSAMPEGYIQERTIFFEDDGNYKSRAEVKFEGDTLVNRIELTGTDFKEDGNILGNKMEYNYNAHNVYIMTDKAKNGIKVNFKIRHNIEDGSVQLADHYQQNTPIGDGPVLLPDNHYLSTQSALSKDPNEKRDHMIYFGFVTAAAITHGMDELYKGSSHHWGYGKHNGPEHWHKDFPIAKGERQSPVDIDTHTAKYDPSLKPLSVSYDQATSLRILNNGHAFNVEFDDSQDKIVLKGGPLDGTYRLIQFHFHWGSLDGQGSEHTVDKKKYAAELHLVHWNTKYGDFGKAVQQPDGLAVLGIFLKVGSAKPGLQKVVDVLDSIKTKGKSADFTNFDPRGLLPESLDYWTYPGSLTTPPLLECVTWIVLKEPISVSSEQVLKFRKLNFNGEGEPEELMVDNWRPAQFLKNRQIKASFKSLDGATNFSLLKQAGDVEENPGPLSKGEEDNMAIIKEFMRFKVHMEGSVNGHEFEIEGEGEGRPYEGTQTAKLKVTKGGPLPFAWDILSPQFMYGSKAYVKHPADIPDYLKLSFPEGFKWERVMNFEDGGVVTVTQDSSLQDGEFIYKVKLRGTNFPSDGPVMQKKTMGWEASSERMYPEDGALKGEIKQRLKLKDGGHYDAEVKTTYKAKKPVQLPGAYNVNIKLDITSHNEDYTIVEQYERAEGRHSTGGMDELYK

SEQ ID NO: 211051 - protein, 758 aa, Artificial Sequence
  Description of Artificial Sequence: Synthetic Construct
MVSKGAELFTGIVPILIELNGDVNGHKFSVSGEGEGDATYGKLTLKFICTTGKLPVPWPTLVTTLSYGVQCFSRYPDHMKQHDFFKSAMPEGYIQERTIFFEDDGNYKSRAEVKFEGDTLVNRIELTGTDFKEDGNILGNKMEYNYNAHNVYIMTDKAKNGIKVNFKIRHNIEDGSVQLADHYQQNTPIGDGPVLLPDNHYLSTQSALSKDPNEKRDHMIYFGFVTAAAITHGMDELYKGSSHHWGYGKHNGPEHWHKDFPIAKGERQSPVDIDTHTAKYDPSLKPLSVSYDQATSLRILNNGHAFNVEFKDSQDKAVLKGGPLDGTYRLIQFHFHWGSLDGQGSEHTVDKKKYAAELHLVHWNTKYGDFGKAVQQPDGLAVLGIFLKVGSAKPGLQKVVDVLDSIKTKGKSADFTNFDPRGLLPESLDYWFYPGSLTTPPLLECVTWIVLKEPISVSSEQVLKFRKLNFNGEGEPEELMVDNWRPAQPLKNRQIKASFKSLDGATNFSLLKQAGDVEENPGPLSKGEEDNMAIIKEFMRFKVHMEGSVNGHEFEIEGEGEGRPYEGTQTAKLKVTKGGPLPFAWDILSPQFMYGSKAYVKHPADIPDYLKLSFPEGFKWERVMNFEDGGVVTVTQDSSLQDGEFIYKVKLRGTNFPSDGPVMQKKTMGWEASSERMYPEDGALKGEIKQRLKLKDGGHYDAEVKTTYKAKKPVQLPGAYNVNIKLDITSHNEDYTIVEQYERAEGRHSTGGMDELYK

SEQ ID NO: 211052 - protein, 783 aa, Artificial Sequence
  Description of Artificial Sequence: Synthetic Construct
MYPYDVPDYAGSSHHWGYGKHNGPEHWHKDFPIAKGERQSPVDIDTHTAKYDPSLKPLSVSYDQATSLRILNNGHAFNVEFDDSQDKAVLKGGPLDGTYRLIQFHFHWGSLDGQGSEHTVDKKKYAAELHLVHWNTKYGDFGKAVQQPDGLAVLGIFLKVGSAKPGHQKVVDVLDSIKTKGKSADFTNFDPRGLLPESLDYWTYPGSLTTPPLLECVTWIVLKEPISVSSEQVLKFRKLNFNGEGEPEELMVDNWRPAQPLKNRQIKASFKGSGSGDYKDDDDKVSKGEELFTGVVPILVELDGDVNGHKFSVSGEGEGDATYGKLTLKFICTTGKLPVPWPTLVTTLTYGVQCFSRYPDHMKQHDFFKSAMPEGYVQERTIFFKDDGNYKTRAEVKFEGDTLVNRIELKGIDFKEDGNILGHKLEYNYNSHNVYIMADKQKNGIKVNFKIRHNIEDGSVQLADHYQQNTPIGDGPVLLPDNHYLSTQSKLSKDPNEKRDHMVLLEFVTAAGITLGMDELYKGSGSLDGATNFSLLKQAGDVEENPGPLSKGEEDNMAIIKEFMRFKVHMEGSVNGHEFEIEGEGEGRPYEGTQTAKLKVTKGGPLPFAWDILSPQFMYGSKAYVKHPADIPDYLKLSFPEGFKWERVMNFEDGGVVTVTQDSSLQDGEFIYKVKLRGTNFPSDGPVMQKKTMGWEASSERMYPEDGALKGEIKQRLKLKDGGHYDAEVKTTYKAKKPVQLPGAYNVNIKLDITSHNEDYTIVEQYERAEGRHSTGGMDELYK

SEQ ID NO: 211053 - protein, 758 aa, Artificial Sequence
  Description of Artificial Sequence: Synthetic Construct
MVSKGAELFTGIVPILIELNGDVNGHKFSVSGEGEGDATYGKLTLKFICTTGKLPVPWPTLVTTLSYGVQCFSRYPDHMKQHDFFKSAMPEGYIQERTIFFEDDGNYKSRAEVKFEGDTLVNRIELTGTDFKEDGNILGNKMEYNYNAHNVYIMTDKAKNGIKVNFKIRHNIEDGSVQLADHYQQNTPIGDGPVLLPDNHYLSTQSALSKDPNEKRDHMIYFGFVTAAAITHGMDELYKGSSHHWGYGKHNGPEHWHKDFPIAKGELQSPVDIDTHTAKYDPSLKPLSVSYDQATSLRILNNGHAFNVEFDDSQDKAVLKGGPLDGTYRLIQFHFHWGSLDGQGSEHTVDKKKYAAELHLVYWNTKYGDFGKAVQQPDGLAVLGIFLKVGSAKPGLQKVVDVLDSIKTKGKSADFTNFDPRGLLPESLDYWTYPGSLTTPPLLECVTWIVLKEPISVSSEQVLKFRKLNFNGEGEPEELMVDNWRPAQPLKNRQIKASFKSLDGATNFSLLKQAGDVEENPGPLSKGEEDNMAIIKEFMRFKVHMEGSVNGHEFEIEGEGEGRPYEGTQTAKLKVTKGGPLPFAWDILSPQFMYGSKAYVKHPADIPDYLKLSFPEGFKWERVMNFEDGGVVTVTQDSSLQDGEFIYKVKLRGTNFPSDGPVMQKKTMGWEASSERMYPEDGALKGEIKQRLKLKDGGHYDAEVKTTYKAKKPVQLPGAYNVNIKLDITSHNEDYTIVEQYERAEGRHSTGGMDELYK

SEQ ID NO: 211054 - protein, 758 aa, Artificial Sequence
  Description of Artificial Sequence: Synthetic Construct
MVSKGAELFTGIVPILIELNGDVNGHKFSVSGEGEGDATYGKLTLKFICTTGKLPVPWPTLVTTLSYGVQCFSRYPDHMKQHDFFKSAMPEGYIQERTIFFEDDGNYKSRAEVKFEGDTLVNRIELTGTDFKEDGNILGNKMEYNYNAHNVYIMTDKAKNGIKVNFKIRHNIEDGSVQLADHYQQNTPIGDGPVLLPDNHYLSTQSALSKDPNEKRDHMIYFGFVTAAAITHGMDELYKGSSHHWGYGKHNGPEHWHKDFPIAKGERQSPVDIDTHTAKYDPSLKPLSVSYDQATSLRILNNGHAFNVEFDDSQDKAVLKGGPLDGIYRLIQFHFHWGSLDGQGSEHTVDKKKYAAELHLVYWNTKYGDFGKAVQQPDGLAVLGIFLKVGSAKPGLQKVVDVLDSIKTKGKSADFTNFDPRGLLPESLDYWTYPGSLTTPPLLECVTWIVLKEPISVSSEQVLKFRKLNFNGEGEPEELMVDNWRPAQPLKNRQIKASFKSLDGATNFSLLKQAGDVEENPGPLSKGEEDNMAIIKEFMRFKVHMEGSVNGHEFEIEGEGEGRPYEGTQTAKLKVTKGGPLPFAWDILSPQFMYGSKAYVKHPADIPDYLKLSFPEGFKWERVMNFEDGGVVTVTQDSSLQDGEFIYKVKLRGTNFPSDGPVMQKKTMGWEASSERMYPEDGALKGEIKQRLKLKDGGHYDAEVKTTYKAKKPVQLPGAYNVNIKLDITSHNEDYTIVEQYERAEGRHSTGGMDELYK

SEQ ID NO: 211055 - protein, 758 aa, Artificial Sequence
  Description of Artificial Sequence: Synthetic Construct
MVSKGAELFTGIVPILIELNGDVNGHKFSVSGEGEGDATYGKLTLKFICTTGKLPVPWPTLVTTLSYGVQCFSRYPDHMKQHDFFKSAMPEGYIQERTIFFEDDGNYKSRAEVKFEGDTLVNRIELTGTDFKEDGNILGNKMEYNYNAHNVYIMTDKAKNGIKVNFKIRHNIEDGSVQLADHYQQNTPIGDGPVLLPDNHYLSTQSALSKDPNEKRDHMIYFGFVTAAAITHGMDELYKGSSHHWGYGKHNGPEHWHKDFPIAKGERQSPVDIDTHTAKYDPSLKPLSVSYDQATSLRILNNGHAFNVEFDDSQDKAVLKGGPLDGTYRLIQFHFHWGSLDGQGSEHTVDKKKYAAELHLVYWNTKYGDFGKAVQQPDGLAVLGIFLKVGSAKPGLQKVVDVLDSIKTKGKSADFTNFDPRGLLPESLDYWTYPGSLTTPPLLECVTWIVLKEPISVSSEQVLKFRKLNFNGEGEPEELMVDNWRPAQPLKDRQIKASFKSLDGATNFSLLKQAGDVEENPGPLSKGEEDNMAIIKEFMRFKVHMEGSVNGHEFEIEGEGEGRPYEGTQTAKLKVTKGGPLPFAWDILSPQFMYGSKAYVKHPADIPDYLKLSFPEGFKWERVMNFEDGGVVTVTQDSSLQDGEFIYKVKLRGTNFPSDGPVMQKKTMGWEASSERMYPEDGALKGEIKQRLKLKDGGHYDAEVKTTYKAKKPVQLPGAYNVNIKLDITSHNEDYTIVEQYERAEGRHSTGGMDELYK

SEQ ID NO: 211056 - protein, 758 aa, Artificial Sequence
  Description of Artificial Sequence: Synthetic Construct
MVSKGAELFTGIVPILIELNGDVNGHKFSVSGEGEGDATYGKLTLKFICTTGKLPVPWPTLVTTLSYGVQCFSRYPDHMKQHDFFKSAMPEGYIQERTIFFEDDGNYKSRAEVKFEGDTLVNRIELTGTDFKEDGNILGNKMEYNYNAHNVYIMTDKAKNGIKVNFKIRHNIEDGSVQLADHYQQNTPIGDGPVLLPDNHYLSTQSALSKDPNEKRDHMIYFGFVTAAAITHGMDELYKGSSHHWGYGKHNGPEHWHKDFPIAKGERQSPVDIDTHTAKYDPSLKPLSVSYDQATSLRILNNGHAFNVEFDFSQDKAVLKGGPLDGTYRLIQFHFHWGSLDGQGSEHTVDKKKYAAELHLVHWNTKYGDFGKAVQQPDGLAVLGIFLKVGSAKPGLQKVVDVLDSIKTKGKSADFTNFDPRGLLPESLDYWTYPGSLTTPPLLECVTWIVLKEPISVSSEQVLKFRKLNFNGEGEPEELMFDNWRPAQPLKNRQIKASFKSLDGATNFSLLKQAGDVEENPGPLSKGEEDNMAIIKEFMRFKVHMEGSVNGHEFEIEGEGEGRPYEGTQTAKLKVTKGGPLPFAWDILSPQFMYGSKAYVKHPADIPDYLKLSFPEGFKWERVMNFEDGGVVTVTQDSSLQDGEFIYKVKLRGTNFPSDGPVMQKKTMGWEASSERMYPEDGALKGEIKQRLKLKDGGHYDAEVKTTYKAKKPVQLPGAYNVNIKLDITSHNEDYTIVEQYERAEGRHSTGGMDELYK

SEQ ID NO: 211057 - protein, 758 aa, Artificial Sequence
  Description of Artificial Sequence: Synthetic Construct
MVSKGAELFTGIVPILIELNGDVNGHKFSVSGEGEGDATYGKLTLKFICTTGKLPVPWPTLVTTLSYGVQCFSRYPDHMKQHDFFKSAMPEGYIQERTIFFEDDGNYKSRAEVKFEGDTLVNRIELTGTDFKEDGNILGNKMEYNYNAHNVYIMTDKAKNGIKVNFKIRHNIEDGSVQLADHYQQNTPIGDGPVLLPDNHYLSTQSALSKDPNEKRDHMIYFGFVTAAAITHGMDELYKGSSHHWGYGKHNGPEHWHKDFPIAKGERQSPVDIDTHTAKYDPSLKPLSVSYDQATSLRILNNGHAFNVEFDDSQDKAVLKGGPLDGTYRLIQFHFHWGSLDGQGSEHTVDKKKYAAELHLVHWNTKYGDFGKAVQQPDGLAVLGIFLKVGSAKPGLQKVVDVLDSIKTKGKSADFTNFDPRGLLPESLDYWTYPGSLTTPPLLECVTWIVLKEPISVSSEQVLKFRKLNFNGEGEPEELMFDNWRPAQLLKNRQIKASFKSLDGATNFSLLKQAGDVEENPGPLSKGEEDNMAIIKEFMRFKVHMEGSVNGHEFEIEGEGEGRPYEGTQTAKLKVTKGGPLPFAWDILSPQFMYGSKAYVKHPADIPDYLKLSFPEGFKWERVMNFEDGGVVTVTQDSSLQDGEFIYKVKLRGTNFPSDGPVMQKKTMGWEASSERMYPEDGALKGEIKQRLKLKDGGHYDAEVKTTYKAKKPVQLPGAYNVNIKLDITSHNEDYTIVEQYERAEGRHSTGGMDELYK

SEQ ID NO: 211058 - protein, 758 aa, Artificial Sequence
  Description of Artificial Sequence: Synthetic Construct
MVSKGAELFTGIVPILIELNGDVNGHKFSVSGEGEGDATYGKLTLKFICTTGKLPVPWPTLVTTLSYGVQCFSRYPDHMKQHDFFKSAMPEGYIQERTIFFEDDGNYKSRAEVKFEGDTLVNRIELTGTDFKEDGNILGNKMEYNYNAHNVYIMTDKAKNGIKVNFKIRHNIEDGSVQLADHYQQNTPIGDGPVLLPDNHYLSTQSALSKDPNEKRDHMIYFGFVTAAAITHGMDELYKGSSHHWGYGKHNGPEHWHKDFPIAKGERQSPVDIDTHTAKYDPSLKPLSVSYDQATSLRILNNGHAFNVEFDFSQDKAVLKGGPLDGTYRLIQFHFHWGSLDGQGSEHTVDKKKYAAELHLVHWNTKYGDFGKAVQQPDGLAVLGIFLKVGSAKPGLQKVVDVLDSIKTKGKSADFTNFDPRGLLPESLDYWTYPGSLTTPPLLECVTWIVLKEPISVSSEQVLKFRKLNFNGEGEPEELMVDNWRPAQLLKNRQIKASFKSLDGATNFSLLKQAGDVEENPGPLSKGEEDNMAIIKEFMRFKVHMEGSVNGHEFEIEGEGEGRPYEGTQTAKLKVTKGGPLPFAWDILSPQFMYGSKAYVKHPADIPDYLKLSFPEGFKWERVMNFEDGGVVTVTQDSSLQDGEFIYKVKLRGTNFPSDGPVMQKKTMGWEASSERMYPEDGALKGEIKQRLKLKDGGHYDAEVKTTYKAKKPVQLPGAYNVNIKLDITSHNEDYTIVEQYERAEGRHSTGGMDELYK

SEQ ID NO: 211059 - protein, 758 aa, Artificial Sequence
  Description of Artificial Sequence: Synthetic Construct
MVSKGAELFTGIVPILIELNGDVNGHKFSVSGEGEGDATYGKLTLKFICTTGKLPVPWPTLVTTLSYGVQCFSRYPDHMKQHDFFKSAMPEGYIQERTIFFEDDGNYKSRAEVKFEGDTLVNRIELTGTDFKEDGNILGNKMEYNYNAHNVYIMTDKAKNGIKVNFKIRHNIEDGSVQLADHYQQNTPIGDGPVLLPDNHYLSTQSALSKDPNEKRDHMIYFGFVTAAAITHGMDELYKGSSHHWGYGKHNGPEHWHKDFPIAKGERQSPVDIDTHTAKYDPSLKPLSVSYDQATSLRILNNGHAFNVEFLDSQDKAVLKGGPLDGNYRLIQFHFHWGSLDGQGSEHTVDKKKYAAELHLVHWNTKYGDFGKAVQQPDGLAVLGIFLKVGSAKPGLQKVVDVLDSIKTKGKSADFTNFDPRGLLPESLDYWTYPGSLTTPPLLECVTWIVLKEPISVSSEQVLKFRKLNFNGEGEPEELMVDNWRPAQPLKNRQIKASFKSLDGATNFSLLKQAGDVEENPGPLSKGEEDNMAIIKEFMRFKVHMEGSVNGHEFEIEGEGEGRPYEGTQTAKLKVTKGGPLPFAWDILSPQFMYGSKAYVKHPADIPDYLKLSFPEGFKWERVMNFEDGGVVTVTQDSSLQDGEFIYKVKLRGTNFPSDGPVMQKKTMGWEASSERMYPEDGALKGEIKQRLKLKDGGHYDAEVKTTYKAKKPVQLPGAYNVNIKLDITSHNEDYTIVEQYERAEGRHSTGGMDELYK

SEQ ID NO: 211060 - protein, 758 aa, Artificial Sequence
  Description of Artificial Sequence: Synthetic Construct
MVSKGAELFTGIVPILIELNGDVNGHKFSVSGEGEGDATYGKLTLKFICTTGKLPVPWPTLVTTLSYGVQCFSRYPDHMKQHDFFKSAMPEGYIQERTIFFEDDGNYKSRAEVKFEGDTLVNRIELTGTDFKEDGNILGNKMEYNYNAHNVYIMTDKAKNGIKVNFKIRHNIEDGSVQLADHYQQNTPIGDGPVLLPDNHYLSTQSALSKDPNEKRDHMIYFGFVTAAAITHGMDELYKGSSHHWGYGKHNGPEHWHKDFPIAKGERQSPVDIDTHTAKYDPSLKPLSVSYDQATSLRILNNGHAFNVEFLDSQDKAVLKGGPLDGTYRLIQFHFHWGSLDGQGSEHTVDKKKYAAELHLVHWNTKYGDFGKAVQQPDGLAVLGIFLKVGSAKPGLQKVVDVLDSIKTKGKSADFTNFDPRGLLPESLDYWTYPGSLTTPPLLECVTWIVLKEPISVSSEQVLKFRKLNFNGEGEPEELMVDNWRPAQPRKNRQIKASFKSLDGATNFSLLKQAGDVEENPGPLSKGEEDNMAIIKEFMRFKVHMEGSVNGHEFEIEGEGEGRPYEGTQTAKLKVTKGGPLPFAWDILSPQFMYGSKAYVKHPADIPDYLKLSFPEGFKWERVMNFEDGGVVTVTQDSSLQDGEFIYKVKLRGTNFPSDGPVMQKKTMGWEASSERMYPEDGALKGEIKQRLKLKDGGHYDAEVKTTYKAKKPVQLPGAYNVNIKLDITSHNEDYTIVEQYERAEGRHSTGGMDELYK

SEQ ID NO: 211061 - protein, 758 aa, Artificial Sequence
  Description of Artificial Sequence: Synthetic Construct
MVSKGAELFTGIVPILIELNGDVNGHKFSVSGEGEGDATYGKLTLKFICTTGKLPVPWPTLVTTLSYGVQCFSRYPDHMKQHDFFKSAMPEGYIQERTIFFEDDGNYKSRAEVKFEGDTLVNRIELTGTDFKEDGNILGNKMEYNYNAHNVYIMTDKAKNGIKVNFKIRHNIEDGSVQLADHYQQNTPIGDGPVLLPDNHYLSTQSALSKDPNEKRDHMIYFGFVTAAAITHGMDELYKGSSHHWGYGKHNGPEHWHKDFPIAKGERQSPVDIDTHTAKYDPSLKPLSVSTDQATSLRILNNGHAFNVEFDDSQDKAVLKGGPLDGTYRLIQFHFHWGSLDGQGSEHTVDKKKYAAELHLVHWNTKYGDFGKAVQQPDGLAVLGIFLKVGSAKPGLQKVVDVLDSIKTKGKSADFTNFDPRGLLPESLDYWTYPGSLTTPPLLECVTWIVLKEPISVSSEQVLKFRKLNFNGEGEPEELMVDNWRPAQPLKNRQIKASFKSLDGATNFSLLKQAGDVEENPGPLSKGEEDNMAIIKEFMRFKVHMEGSVNGHEFEIEGEGEGRPYEGTQTAKLKVTKGGPLPFAWDILSPQFMYGSKAYVKHPADIPDYLKLSFPEGFKWERVMNFEDGGVVTVTQDSSLQDGEFIYKVKLRGTNFPSDGPVMQKKTMGWEASSERMYPEDGALKGEIKQRLKLKDGGHYDAEVKTTYKAKKPVQLPGAYNVNIKLDITSHNEDYTIVEQYERAEGRHSTGGMDELYK

SEQ ID NO: 211062 - protein, 758 aa, Artificial Sequence
  Description of Artificial Sequence: Synthetic Construct
MVSKGAELFTGIVPILIELNGDVNGHKFSVSGEGEGDATYGKLTLKFICTTGKLPVPWPTLVTTLSYGVQCFSRYPDHMKQHDFFKSAMPEGYIQERTIFFEDDGNYKSRAEVKFEGDTLVNRIELTGTDFKEDGNILGNKMEYNYNAHNVYIMTDKAKNGIKVNFKIRHNIEDGSVQLADHYQQNTPIGDGPVLLPDNHYLSTQSALSKDPNEKRDHMIYFGFVTAAAITHGMDELYKGSSHHWGYGKHNGPEHWHKDFPIAKGERQSPVDIDTHTAKYDPSLKPLSVSYDQATSLRILNNGHAFNVEFDDNQDKAVLKGGPLDGTYFLIQFHFHWGSLDGQGSEHTVDKKKYAAELHLVHWNTKYGDFGKAVQQPDGLAVLGIFLKVGSAKPGLQKVVDVLDSIKTKGKSADFTNFDPRGLLPESLDYWTYPGSLTTPPLLECVTWIVLKEPISVSSEQVLKFRKLNFNGEGEPEELMVDNWRPAQPLKNRQIKASFKSLDGATNFSLLKQAGDVEENPGPLSKGEEDNMAIIKEFMRFKVHMEGSVNGHEFEIEGEGEGRPYEGTQTAKLKVTKGGPLPFAWDILSPQFMYGSKAYVKHPADIPDYLKLSFPEGFKWERVMNFEDGGVVTVTQDSSLQDGEFIYKVKLRGTNFPSDGPVMQKKTMGWEASSERMYPEDGALKGEIKQRLKLKDGGHYDAEVKTTYKAKKPVQLPGAYNVNIKLDITSHNEDYTIVEQYERAEGRHSTGGMDELYK

SEQ ID NO: 211063 - protein, 758 aa, Artificial Sequence
  Description of Artificial Sequence: Synthetic Construct
MVSKGAELFTGIVPILIELNGDVNGHKFSVSGEGEGDATYGKLTLKFICTTGKLPVPWPTLVTTLSYGVQCFSRYPDHMKQHDFFKSAMPEGYIQERTIFFEDDGNYKSRAEVKFEGDTLVNRIELTGTDFKEDGNILGNKMEYNYNAHNVYIMTDKAKNGIKVNFKIRHNIEDGSVQLADHYQQNTPIGDGPVLLPDNHYLSTQSALSKDPNEKRDHMIYFGFVTAAAITHGMDELYKGSSHHWGYGKHNGPEHWHKDFPIAKGERQSPVDIDTHTAKYDPSLKPLSVSYDQATSLRILNNGHAFNVEFDFSQDKAVLKGGPLDGTYRLIQFHFHWGSLDGQGSEHTVDKKKYAAELHLVHWNTKYGDFGKAVQQPDGLAVLGIFLKVGSAKPGLQKVVDVLDSIKTKGKSADFTNFDPRGLLPESLDYWTYPGSLTTPPLLECVTWIVLKEPISVSSEQVLKFRKLNFNGEGEPEELMVDNWRPAQFLKNRQIKASFKSLDGATNFSLLKQAGDVEENPGPLSKGEEDNMAIIKEFMRFKVHMEGSVNGHEFEIEGEGEGRPYEGTQTAKLKVTKGGPLPFAWDILSPQFMYGSKAYVKHPADIPDYLKLSFPEGFKWERVMNFEDGGVVTVTQDSSLQDGEFIYKVKLRGTNFPSDGPVMQKKTMGWEASSERMYPEDGALKGEIKQRLKLKDGGHYDAEVKTTYKAKKPVQLPGAYNVNIKLDITSHNEDYTIVEQYERAEGRHSTGGMDELYK

SEQ ID NO: 211064 - protein, 758 aa, Artificial Sequence
  Description of Artificial Sequence: Synthetic Construct
MVSKGAELFTGIVPILIELNGDVNGHKFSVSGEGEGDATYGKLTLKFICTTGKLPVPWPTLVTTLSYGVQCFSRYPDHMKQHDFFKSAMPEGYIQERTIFFEDDGNYKSRAEVKFEGDTLVNRIELTGTDFKEDGNILGNKMEYNYNAHNVYIMTDKAKNGIKVNFKIRHNIEDGSVQLADHYQQNTPIGDGPVLLPDNHYLSTQSALSKDPNEKRDHMIYFGFVTAAAITHGMDELYKGSSHHWGYGKHNGPEHWHKDFPIAKGERQSPVDIDTHTAKYDPSLKPLSVSYDQAKSLRILNNNHAFNVEFDDSQDKAVLKGGPLDGTYRLIQFHFHWGSLDGQGSEHTVDKKKYAAELHLVHWNTKYGDFGKAVQQPDGLAVLGIFLKVGSAKPGLQKVVDVLDSIKTKGKSADFTNFDPRGLLPESLDYWTYPGSLTTPPLLECVTWIVLKEPISVSSEQVLKFRKLNFNGEGEPEELMVDNWRPANPLKNRQIKASFKSLDGATNFSLLKQAGDVEENPGPLSKGEEDNMAIIKEFMRFKVHMEGSVNGHEFEIEGEGEGRPYEGTQTAKLKVTKGGPLPFAWDILSPQFMYGSKAYVKHPADIPDYLKLSFPEGFKWERVMNFEDGGVVTVTQDSSLQDGEFIYKVKLRGTNFPSDGPVMQKKTMGWEASSERMYPEDGALKGEIKQRLKLKDGGHYDAEVKTTYKAKKPVQLPGAYNVNIKLDITSHNEDYTIVEQYERAEGRHSTGGMDELYK

SEQ ID NO: 211065 - protein, 758 aa, Artificial Sequence
  Description of Artificial Sequence: Synthetic Construct
MVSKGAELFTGIVPILIELNGDVNGHKFSVSGEGEGDATYGKLTLKFICTTGKLPVPWPTLVTTLSYGVQCFSRYPDHMKQHDFFKSAMPEGYIQERTIFFEDDGNYKSRAEVKFEGDTLVNRIELTGTDFKEDGNILGNKMEYNYNAHNVYIMTDKAKNGIKVNFKIRHNIEDGSVQLADHYQQNTPIGDGPVLLPDNHYLSTQSALSKDPNEKRDHMIYFGFVTAAAITHGMDELYKGSSHHWGYGKHNGPEHWHKDFPIAKGERQSPVDIDTHTAKYDPSLKPLSVSYDQATSLRILNNGHAFNVEFDDSQDKAVLKGGPLDGTYRLIQFHFHWGSLDGQGSEHTVDKKKYAAELHLVHWNTKYGDFGKAVQQPDGLAVLGIFLKVGSAKPGLQKVVDVLDSIKTKGKSADFTNFDPRGLLPESLDYWTIPGSLTTPPLLECVTWIVLKEPISVSSEQVLKFRKLNFNGEGEPEELMVDNWRPAQPLKNRQIKASFKSLDGATNFSLLKQAGDVEENPGPLSKGEEDNMAIIKEFMRFKVHMEGSVNGHEFEIEGEGEGRPYEGTQTAKLKVTKGGPLPFAWDILSPQFMYGSKAYVKHPADIPDYLKLSFPEGFKWERVMNFEDGGVVTVTQDSSLQDGEFIYKVKLRGTNFPSDGPVMQKKTMGWEASSERMYPEDGALKGEIKQRLKLKDGGHYDAEVKTTYKAKKPVQLPGAYNVNIKLDITSHNEDYTIVEQYERAEGRHSTGGMDELYK

SEQ ID NO: 211066 - protein, 758 aa, Artificial Sequence
  Description of Artificial Sequence: Synthetic Construct
MVSKGAELFTGIVPILIELNGDVNGHKFSVSGEGEGDATYGKLTLKFICTTGKLPVPWPTLVTTLSYGVQCFSRYPDHMKQHDFFKSAMPEGYIQERTIFFEDDGNYKSRAEVKFEGDTLVNRIELTGTDFKEDGNILGNKMEYNYNAHNVYIMTDKAKNGIKVNFKIRHNIEDGSVQLADHYQQNTPIGDGPVLLPDNHYLSTQSALSKDPNEKRDHMIYFGFVTAAAITHGMDELYKGSSHHWGYGKHNGPEHWHKDFPIAKGERQSPVDIDTHTAKYDPSLKPLSVSYDQATFLRILNNGHAFNVEFDDSQDKAVLKGGPLDGTYRLIQFHFHWGSLDGQGSEHTVDKKKYAAELHLVHWNTKYGDFGKAVQQPDGLAVLGIFLKVGSAKPGLQKVVDVLDSIKTKGKSADFTNFDPRGLLPESLDYWTYPGSLTTPPLLECVTWIVLKEPISVSSEQVLKFRKLNFNGEGEPEELMVDNWRPAQPLKNRQIKASFKSLDGATNFSLLKQAGDVEENPGPLSKGEEDNMAIIKEFMRFKVHMEGSVNGHEFEIEGEGEGRPYEGTQTAKLKVTKGGPLPFAWDILSPQFMYGSKAYVKHPADIPDYLKLSFPEGFKWERVMNFEDGGVVTVTQDSSLQDGEFIYKVKLRGTNFPSDGPVMQKKTMGWEASSERMYPEDGALKGEIKQRLKLKDGGHYDAEVKTTYKAKKPVQLPGAYNVNIKLDITSHNEDYTIVEQYERAEGRHSTGGMDELYK

SEQ ID NO: 211067 - protein, 758 aa, Artificial Sequence
  Description of Artificial Sequence: Synthetic Construct
MVSKGAELFTGIVPILIELNGDVNGHKFSVSGEGEGDATYGKLTLKFICTTGKLPVPWPTLVTTLSYGVQCFSRYPDHMKQHDFFKSAMPEGYIQERTIFFEDDGNYKSRAEVKFEGDTLVNRIELTGTDFKEDGNILGNKMEYNYNAHNVYIMTDKAKNGIKVNFKIRHNIEDGSVQLADHYQQNTPIGDGPVLLPDNHYLSTQSALSKDPNEKRDHMIYFGFVTAAAITHGMDELYKGSSHHWGYGKHNGPEHWHKDFPIAKGERQSPVDIDTHTAKYDPSLKPLSVSYDQATFLRILNNGHAFNVEFSDSQDKAVLKGGPLDGTYRLIQFHFHWGSLDGQGSEHTVDKKKYAAELHLVHWNTKYGDFGKAVQQPDGLAVLGIFLKVGSAKPGLQKVVDVLDSIKTKGKSADFTNFDPRGLLPESLDYWTYPGSLTTPPLLECVTWIVLKEPISVSSEQVLKFRKLNFNGEGEPEELMVDNWRPAQPLKNRQIKASFKSLDGATNFSLLKQAGDVEENPGPLSKGEEDNMAIIKEFMRFKVHMEGSVNGHEFEIEGEGEGRPYEGTQTAKLKVTKGGPLPFAWDILSPQFMYGSKAYVKHPADIPDYLKLSFPEGFKWERVMNFEDGGVVTVTQDSSLQDGEFIYKVKLRGTNFPSDGPVMQKKTMGWEASSERMYPEDGALKGEIKQRLKLKDGGHYDAEVKTTYKAKKPVQLPGAYNVNIKLDITSHNEDYTIVEQYERAEGRHSTGGMDELYK

SEQ ID NO: 211068 - protein, 758 aa, Artificial Sequence
  Description of Artificial Sequence: Synthetic Construct
MVSKGAELFTGIVPILIELNGDVNGHKFSVSGEGEGDATYGKLTLKFICTTGKLPVPWPTLVTTLSYGVQCFSRYPDHMKQHDFFKSAMPEGYIQERTIFFEDDGNYKSRAEVKFEGDTLVNRIELTGTDFKEDGNILGNKMEYNYNAHNVYIMTDKAKNGIKVNFKIRHNIEDGSVQLADHYQQNTPIGDGPVLLPDNHYLSTQSALSKDPNEKRDHMIYFGFVTAAAITHGMDELYKGSSHHWGYGKHNGPEHWHKDFPIAKGERQSPVDIDTHTAKYDPSLKPLSVSYDQATSLRILNNGHAFNVEFDDNQDKAVLKGGPLDGTYYLIQFHFHWGSLDGQGSEHTVDKKKYAAELHLVHWNTKYGDFGKAVQQPDGLAVLGIFLKVGSAKPGLQKVVDVLDSIKTKGKSADFTNFDPRGLLPESLDYWTYPGSLTTPPLLECVTWIVLKEPISVSSEQVLKFRKLNFNGEGEPEELMVDNWRPAQPLKNRQIKASFKSLDGATNFSLLKQAGDVEENPGPLSKGEEDNMAIIKEFMRFKVHMEGSVNGHEFEIEGEGEGRPYEGTQTAKLKVTKGGPLPFAWDILSPQFMYGSKAYVKHPADIPDYLKLSFPEGFKWERVMNFEDGGVVTVTQDSSLQDGEFIYKVKLRGTNFPSDGPVMQKKTMGWEASSERMYPEDGALKGEIKQRLKLKDGGHYDAEVKTTYKAKKPVQLPGAYNVNIKLDITSHNEDYTIVEQYERAEGRHSTGGMDELYK

SEQ ID NO: 211069 - protein, 758 aa, Artificial Sequence
  Description of Artificial Sequence: Synthetic Construct
MVSKGAELFTGIVPILIELNGDVNGHKFSVSGEGEGDATYGKLTLKFICTTGKLPVPWPTLVTTLSYGVQCFSRYPDHMKQHDFFKSAMPEGYIQERTIFFEDDGNYKSRAEVKFEGDTLVNRIELTGTDFKEDGNILGNKMEYNYNAHNVYIMTDKAKNGIKVNFKIRHNIEDGSVQLADHYQQNTPIGDGPVLLPDNHYLSTQSALSKDPNEKRDHMIYFGFVTAAAITHGMDELYKGSSHHWGYGKHNGPEHWHKDFPIAKGERQSPVDIDTHTAKYDPSLKPLSVSYDQATSLRILNNGHAFNVEFDDSQDKAVLKGGPLDGTYRLIQFHFHWGSLDGQGSEHTVDKKKYAAELHLVHWNTKYGDFGKAFQQPDGLAVLGIFLKVGSAKPGLQKVVDVLDSIKTKGKSADFTNFDPRGLLPESLDYWTYPGSLTTPPLLECVTWIVLKEPISVSSEQVLKFRKFNFNGEGEPEELMVDNWRPAQPLKNRQIKASFKSLDGATNFSLLKQAGDVEENPGPLSKGEEDNMAIIKEFMRFKVHMEGSVNGHEFEIEGEGEGRPYEGTQTAKLKVTKGGPLPFAWDILSPQFMYGSKAYVKHPADIPDYLKLSFPEGFKWERVMNFEDGGVVTVTQDSSLQDGEFIYKVKLRGTNFPSDGPVMQKKTMGWEASSERMYPEDGALKGEIKQRLKLKDGGHYDAEVKTTYKAKKPVQLPGAYNVNIKLDITSHNEDYTIVEQYERAEGRHSTGGMDELYK

SEQ ID NO: 211070 - protein, 754 aa, Artificial Sequence
  Description of Artificial Sequence: Synthetic Construct
MVSKGAELFTGIVPILIELNGDVNGHKFSVSGEGEGDATYGKLTLKFICTTGKLPVPWPTLVTTLSYGVQCFSRYPDHMKQHDFFKSAMPEGYIQERTIFFEDDGNYKSRAEVKFEGDTLVNRIELTGTDFKEDGNILGNKMEYNYNAHNVYIMTDKAKNGIKVNFKIRHNIEDGSVQLADHYQQNTPIGDGPVLLPDNHYLSTQSALSKDPNEKRDHMIYFGFVTAAAITHGMDELYKGSSHHWGYGKHNGPEHWHKDFPIAKGERQSPVDIDTHTAKYDPSLKPLSVSYDQATSLRILNNGHAFNVEFDDSQDKAVLKGGPLDGTYRLIQFHFHWGSLDGQGSEHTVDKKKYAAELHLVHWNTKYGDFGKAVQQPDGLAVLGIFLKVGSAKPGHQKVVDVLDSIKTKGKSADFTNFDPRGLLPESLDYWTYPGSLTTPPLLECVTWIVLKEPISVSSEQVLKFRKLNFNGEGEPEELMVDNWRPAQPLKNRQIKSLDGATNFSLLKQAGDVEENPGPLSKGEEDNMAIIKEFMRFKVHMEGSVNGHEFEIEGEGEGRPYEGTQTAKLKVTKGGPLPFAWDILSPQFMYGSKAYVKHPADIPDYLKLSFPEGFKWERVMNFEDGGVVTVTQDSSLQDGEFIYKVKLRGTNFPSDGPVMQKKTMGWEASSERMYPEDGALKGEIKQRLKLKDGGHYDAEVKTTYKAKKPVQLPGAYNVNIKLDITSHNEDYTIVEQYERAEGRHSTGGMDELYK

SEQ ID NO: 211071 - protein, 754 aa, Artificial Sequence
  Description of Artificial Sequence: Synthetic Construct
MVSKGAELFTGIVPILIELNGDVNGHKFSVSGEGEGDATYGKLTLKFICTTGKLPVPWPTLVTTLSYGVQCFSRYPDHMKQHDFFKSAMPEGYIQERTIFFEDDGNYKSRAEVKFEGDTLVNRIELTGTDFKEDGNILGNKMEYNYNAHNVYIMTDKAKNGIKVNFKIRHNIEDGSVQLADHYQQNTPIGDGPVLLPDNHYLSTQSALSKDPNEKRDHMIYFGFVTAAAITHGMDELYKGSGYGKHNGPEHWHKDFPIAKGERQSPVDIDTHTAKYDPSLKPLSVSYDQATSLRILNNGHAFNVEFDDSQDKAVLKGGPLDGTYRLIQFHFHWGSLDGQGSEHTVDKKKYAAELHLVHWNTKYGDFGKAVQQPDGLAVLGIFLKVGSAKPGHQKVVDVLDSIKTKGKSADFTNFDPRGLLPESLDYWTYPGSLTTPPLLECVTWIVLKEPISVSSEQVLKFRKLNFNGEGEPEELMVDNWRPAQPLKNRQIKASFKSLDGATNFSLLKQAGDVEENPGPLSKGEEDNMAIIKEFMRFKVHMEGSVNGHEFEIEGEGEGRPYEGTQTAKLKVTKGGPLPFAWDILSPQFMYGSKAYVKHPADIPDYLKLSFPEGFKWERVMNFEDGGVVTVTQDSSLQDGEFIYKVKLRGTNFPSDGPVMQKKTMGWEASSERMYPEDGALKGEIKQRLKLKDGGHYDAEVKTTYKAKKPVQLPGAYNVNIKLDITSHNEDYTIVEQYERAEGRHSTGGMDELYK

SEQ ID NO: 211072 - protein, 758 aa, Artificial Sequence
  Description of Artificial Sequence: Synthetic Construct
MVSKGAELFTGIVPILIELNGDVNGHKFSVSGEGEGDATYGKLTLKFICTTGKLPVPWPTLVTTLSYGVQCFSRYPDHMKQHDFFKSAMPEGYIQERTIFFEDDGNYKSRAEVKFEGDTLVNRIELTGTDFKEDGNILGNKMEYNYNAHNVYIMTDKAKNGIKVNFKIRHNIEDGSVQLADHYQQNTPIGDGPVLLPDNHYLSTQSALSKDPNEKRDHMIYFGFVTAAAITHGMDELYKGSSHHYGYGKHNGPEHWHKDFPIAKGERQSPVDIDTHTAKYDPSLKPLSVSYDQATSLRILNNGHAFNVEFDDSQDKAVLKGGPLDGTYRLIQFHFHWGSLDGQGSEHTVDKKKYAAELHLVHWNTKYGDFGKAVQQPDGLAVLGIFLKVGSAKPGHQKVVDVLDSIKTKGKSADFTNFDPRGLLPESLDYWTYPGSLTTPPLLECVTWIVLKEPISVSSEQVLKFRKLNFNGEGEPEELMVDNWRPAQPLKNRQIKASFKSLDGATNFSLLKQAGDVEENPGPLSKGEEDNMAIIKEFMRFKVHMEGSVNGHEFEIEGEGEGRPYEGTQTAKLKVTKGGPLPFAWDILSPQFMYGSKAYVKHPADIPDYLKLSFPEGFKWERVMNFEDGGVVTVTQDSSLQDGEFIYKVKLRGTNFPSDGPVMQKKTMGWEASSERMYPEDGALKGEIKQRLKLKDGGHYDAEVKTTYKAKKPVQLPGAYNVNIKLDITSHNEDYTIVEQYERAEGRHSTGGMDELYK

SEQ ID NO: 211073 - protein, 755 aa, Artificial Sequence
  Description of Artificial Sequence: Synthetic Construct
MVSKGAELFTGIVPILIELNGDVNGHKFSVSGEGEGDATYGKLTLKFICTTGKLPVPWPTLVTTLSYGVQCFSRYPDHMKQHDFFKSAMPEGYIQERTIFFEDDGNYKSRAEVKFEGDTLVNRIELTGTDFKEDGNILGNKMEYNYNAHNVYIMTDKAKNGIKVNFKIRHNIEDGSVQLADHYQQNTPIGDGPVLLPDNHYLSTQSALSKDPNEKRDHMIYFGFVTAAAITHGMDELYKGSSHHWGYGKHNGPEHWHKDFPIAKGERQSPVDIDTHTAKYDPSLKPLSVSYDQATSLRILNNGHAFNVEFDDSQDKAVLKGGPLDGTYRLIQFHFHWGSLDGQGSEHTVDKKKYAAELHLVHWNTKYGDFGKAVQQPDGLAVLGIFLKVGSAKPGHQKVVDVLDSIKTKGKSADFTNFDPRGLLPESLDYWTYPGSLTTPPLLECVTWIVLKEPISVSSEQVLKFRKLNFNGEEELMVDNWRPAQPLKNRQIKASFKSLDGATNFSLLKQAGDVEENPGPLSKGEEDNMAIIKEFMRFKVHMEGSVNGHEFEIEGEGEGRPYEGTQTAKLKVTKGGPLPFAWDILSPQFMYGSKAYVKHPADIPDYLKLSFPEGFKWERVMNFEDGGVVTVTQDSSLQDGEFIYKVKLRGTNFPSDGPVMQKKTMGWEASSERMYPEDGALKGEIKQRLKLKDGGHYDAEVKTTYKAKKPVQLPGAYNVNIKLDITSHNEDYTIVEQYERAEGRHSTGGMDELYK

SEQ ID NO: 211074 - protein, 758 aa, Artificial Sequence
  Description of Artificial Sequence: Synthetic Construct
MVSKGAELFTGIVPILIELNGDVNGHKFSVSGEGEGDATYGKLTLKFICTTGKLPVPWPTLVTTLSYGVQCFSRYPDHMKQHDFFKSAMPEGYIQERTIFFEDDGNYKSRAEVKFEGDTLVNRIELTGTDFKEDGNILGNKMEYNYNAHNVYIMTDKAKNGIKVNFKIRHNIEDGSVQLADHYQQNTPIGDGPVLLPDNHYLSTQSALSKDPNEKRDHMIYFGFVTAAAITHGMDELYKGSSHHWGYGKHNGPEHWHKDFPIAKGERQSPVDIDTHTAKYDPSLKPLSVSYDQATSLRILNNGHAFNVEFDDSQDKAVLKGGPLDGTYRLIQFHFHWGSLDGQGSEHTVDKKKYAAELHLVHWNTKYGDFGKAVQQPDGLAVLGIFLKVGSAKPGHQKVVDVLDSIKTKGKSADFTNFDPRGLLPESLDYWTYPGSLTTPPLLECVTWIVLKEPISVSSEQVLKLRKLNFNGEGEPEELMVDNWRPAQPLKNRQIKASFKSLDGATNFSLLKQAGDVEENPGPLSKGEEDNMAIIKEFMRFKVHMEGSVNGHEFEIEGEGEGRPYEGTQTAKLKVTKGGPLPFAWDILSPQFMYGSKAYVKHPADIPDYLKLSFPEGFKWERVMNFEDGGVVTVTQDSSLQDGEFIYKVKLRGTNFPSDGPVMQKKTMGWEASSERMYPEDGALKGEIKQRLKLKDGGHYDAEVKTTYKAKKPVQLPGAYNVNIKLDITSHNEDYTIVEQYERAEGRHSTGGMDELYK

SEQ ID NO: 211075 - protein, 758 aa, Artificial Sequence
  Description of Artificial Sequence: Synthetic Construct
MVSKGAELFTGIVPILIELNGDVNGHKFSVSGEGEGDATYGKLTLKFICTTGKLPVPWPTLVTTLSYGVQCFSRYPDHMKQHDFFKSAMPEGYIQERTIFFEDDGNYKSRAEVKFEGDTLVNRIELTGTDFKEDGNILGNKMEYNYNAHNVYIMTDKAKNGIKVNFKIRHNIEDGSVQLADHYQQNTPIGDGPVLLPDNHYLSTQSALSKDPNEKRDHMIYFGFVTAAAITHGMDELYKGSSHHWGYGKHNGPEHWHKDFPIAKGERQSPVDIDTHTAKYDPSLKPLSVSYDQATSLRILNNGHAFNVEFNDSQNKAVLKGGPLDGTYRLIQFHFHWGSLNGQGSEHTVDKKKYAAELHLVHWNTKYGDFGKAVQQPDGLAVLGIFLKVGSAKPGHQKVVDVLDSIKTKGKSADFTNFDPRGLLPESLDYWTYPGSLTTPPLLECVTWIVLKEPISVSSEQVLKFRKLNFNGEGEPEELMVDNWRPAQPLKNRQIKASFKSLDGATNFSLLKQAGDVEENPGPLSKGEEDNMAIIKEFMRFKVHMEGSVNGHEFEIEGEGEGRPYEGTQTAKLKVTKGGPLPFAWDILSPQFMYGSKAYVKHPADIPDYLKLSFPEGFKWERVMNFEDGGVVTVTQDSSLQDGEFIYKVKLRGTNFPSDGPVMQKKTMGWEASSERMYPEDGALKGEIKQRLKLKDGGHYDAEVKTTYKAKKPVQLPGAYNVNIKLDITSHNEDYTIVEQYERAEGRHSTGGMDELYK

SEQ ID NO: 211076 - DNA, 2745 bp, Artificial Sequence
  Description of Artificial Sequence: Synthetic Construct
atggtgagcaagggcgccgagctgttcaccggcatcgtgcccatcctgatcgagctgaatggcgatgtgaatggccacaagttcagcgtgagcggcgagggcgagggcgatgccacctacggcaagctgaccctgaagttcatctgcaccaccggcaagctgcctgtgccctggcccaccctggtgaccaccctgagctacggcgtgcagtgcttctcacgctaccccgatcacatgaagcagcacgacttcttcaagagcgccatgcctgagggctacatccaggagcgcaccatcttcttcgaggatgacggcaactacaagtcgcgcgccgaggtgaagttcgagggcgataccctggtgaatcgcatcgagctgaccggcaccgatttcaaggaggatggcaacatcctgggcaataagatggagtacaactacaacgcccacaatgtgtacatcatgaccgacaaggccaagaatggcatcaaggtgaacttcaagatccgccacaacatcgaggatggcagcgtgcagctggccgaccactaccagcagaatacccccatcggcgatggccctgtgctgctgcccgataaccactacctgtccacccagagcgccctgtccaaggaccccaacgagaagcgcgatcacatgatctacttcggcttcgtgaccgccgccgccatcacccacggcatggatgagctgtacaagggatccggttcccatcactgggggtacggcaaacacaacggacctgagcactggcataaggacttccccattgccaagggagagcgccagtcccctgttgacatcgacactcatacagccaagtatgacccttccctgaagcccctgtctgtttcctatgatcaagcaacttccctgaggatcctcaacaatggtcatgctttcaacgtggagtttgatgactctcaggacaaagcagtgctcaagggaggacccctggatggcacttacagattgattcagtttcactttcactggggttcacttgatggacaaggttcagaccatactgtggataaaaagaaatatgctgcagaacttcacttggttcactggaacaccaaatatggggattttgggaaagctgtgcagcaacctgatggactggccgttctaggtatttttttgaaggttggcagcgctaaaccgggccttcagaaagttgttgatgtgctggattccattaaaacaaagggcaagagtgctgacttcactaacttcgatcctcgtggcctccttcctgaatccctggattactggacctacccaggctcactgaccacccctcctcttctggaatgtgtgacctggattgtgctcaaggaacccatcagcgtcagcagcgagcaggtgttgaaattccgtaaacttaacttcaatggggagggtgaacccgaagaactgatggtggacaactggcgcccagctcagccactgaagaacaggcaaatcaaagcttccttcaaatgataatctagataatacgactcactagagatcccgcccctctccctcccccccccctaacgttactggccgaagccgcttggaataaggccggtgtgcgtttgtctatatgttattttccaccatattgccgtcttttggcaatgtgagggcccggaaacctggccctgtcttcttgacgagcattcctaggggtctttcccctctcgccaaaggaatgcaaggtctgttgaatgtcgtgaaggaagcagttcctctggaagcttcttgaagacaaacaacgtctgtagcgaccctttgcaggcagcggaaccccccacctggcgacaggtgcctctgcggccaaaagccacgtgtataagatacacctgcaaaggcggcacaaccccagtgccacgttgtgagttggatagttgtggaaagagtcaaatggctctcctcaagcgtattcaacaaggggctgaaggatgcccagaaggtaccccattgtatgggatctgatctggggcctcggtgcacatgctttacatgtgtttagtcgaggttaaaaaaacgtctaggccccccgaaccacggggacgtggttttcctttgaaaaacacgatgataagcttgccacaacccacaaggagacgaccttccatgaccgagtacaagcccacggtgcgcctcgccacccgcgacgacgtcccccgggccgtacgcaccctcgccgccgcgttcgccgactaccccgccacgcgccacaccgtcgacccggaccgccacatcgagcgggtcaccgagctgcaagaactcttcctcacgcgcgtcgggctcgacatcggcaaggtgtgggtcgcggacgacggcgccgcggtggcggtctggaccacgccggagagcgtcgaagcgggggcggtgttcgccgagatcggcccgcgcatggccgagttgagcggttcccggctggccgcgcagcaacagatggaaggcctcctggcgccgcaccggcccaaggagcccgcgtggttcctggccaccgtcggcgtctcgcccgaccaccagggcaagggtctgggcagcgccgtcgtgctccccggagtggaggcggccgagcgcgccggggtgcccgccttcctggagacctccgcgccccgcaacctccccttctacgagcggctcggcttcaccgtcaccgccgacgtcgaggtgcccgaaggaccgcgcacctggtgcatgacccgcaagcccggtgcctag

SEQ ID NO: 211077 - DNA, 1506 bp, Artificial Sequence
  Description of Artificial Sequence: Synthetic Construct
atggtgagcaagggcgccgagctgttcaccggcatcgtgcccatcctgatcgagctgaatggcgatgtgaatggccacaagttcagcgtgagcggcgagggcgagggcgatgccacctacggcaagctgaccctgaagttcatctgcaccaccggcaagctgcctgtgccctggcccaccctggtgaccaccctgagctacggcgtgcagtgcttctcacgctaccccgatcacatgaagcagcacgacttcttcaagagcgccatgcctgagggctacatccaggagcgcaccatcttcttcgaggatgacggcaactacaagtcgcgcgccgaggtgaagttcgagggcgataccctggtgaatcgcatcgagctgaccggcaccgatttcaaggaggatggcaacatcctgggcaataagatggagtacaactacaacgcccacaatgtgtacatcatgaccgacaaggccaagaatggcatcaaggtgaacttcaagatccgccacaacatcgaggatggcagcgtgcagctggccgaccactaccagcagaatacccccatcggcgatggccctgtgctgctgcccgataaccactacctgtccacccagagcgccctgtccaaggaccccaacgagaagcgcgatcacatgatctacttcggcttcgtgaccgccgccgccatcacccacggcatggatgagctgtacaagggatctggttcccatcactgggggtacggcaaacacaacggacctgagcactggcataaggacttccccattgccaagggagagcgccagtcccctgttgacatcgacactcatacagccaagtatgacccatccctgaagcccctgtctgtttcctacgatcaagcaacttccctgaggaacctcaacaatggtcatgctttcaacgtggagtttgatgactctcaggacaaagcagtgctcaagggaggacccctggatggcacttacagattgattcagtttcactttcactggggttcacttgatagacaaggttcagagcatactgtggataaaaagaaatatgctgcagaacttcacttggttcactggaacaccaaatatggggattttgggaaagctgtgcagcaacctgatggactggccgttctaggtatttttttgaaggttggcagcgctaaaccgggccttcagaaagttgttgatgtgctggattccattaaaacaaagggcaagagtgctgacttcactaacttcgatcctcgtggcctccttcctgaatccctggattactggacctacccaggctcactgaccacccctcctcttctggaatgtgtgacctggattgtgctcaaggaacccatcagcgtcagcagcgagcaggtgttgaaattccgtaaacttaacttcaatggagagggtgaacccgaagaactgatggtggacaactggcgcccagctcagccactgaagaacaggcaaatcaaagcttccttcaaatga

SEQ ID NO: 211078 - DNA, 1506 bp, Artificial Sequence
  Description of Artificial Sequence: Synthetic Construct
atggtgagcaagggcgccgagctgttcaccggcatcgtgcccatcctgatcgagctgaatggcgatgtgaatggccacaagttcagcgtgagcggcgagggcgagggcgatgccacctacggcaagctgaccctgaagttcatctgcaccaccggcaagctgcctgtgccctggcccaccctggtgaccaccctgagctacggcgtgcagtgcttctcacgctaccccgatcacatgaagcagcacgacttcttcaagagcgccatgcctgagggctacatccaggagcgcaccatcttcttcgaggatgacggcaactacaagtcgcgcgccgaggtgaagttcgagggcgataccctggtgaatcgcatcgagctgaccggcaccgatttcaaggaggatggcaacatcctgggcaataagatggagtacaactacaacgcccacaatgtgtacatcatgaccgacaaggccaagaatggcatcaaggtgaacttcaagatccgccacaacatcgaggatggcagcgtgcagctggccgaccactaccagcagaatacccccatcggcgatggccctgtgctgctgcccgataaccactacctgtccacccagagcgccctgtccaaggaccccaacgagaagcgcgatcacatgatctacttcggcttcgtgaccgccgccgccatcacccacggcatggatgagctgtacaagggatctggttcccatcactgggggtacggcaaacacaacggacctgagcactggcataaggacttccccattgccaagggagagcgtcagtcccctgttgacatcgacactcatacagccaagtatgacccttccctgaagcccctgtctgtttcctatgatcaagcaacttccctgaggatcctcaacaatggtcatgctttcaacgtggagtttgatgactctcaggacaaagcagtgctcaagggaggacccctggatggcacttacagattgattcagtttcactttcactggggttcacttgatggacaaggttcagagcatactgtggataaaaagaaatatgctgcagaacttcacttggttcactggaacaccaaatatggggattttgggaaagctgtgcagcaacctgatggactggccgttctaggtatttttttgaaggttggcagcgctaaaccgggccttcagaaagttgttgatgtgctggattccattaaaacaaagggcaagagtgctgacttcactaacttcgatcctcgtggcctccttcctgaatccctggattactggacctacccaggctcaccgaccacccctcctcttctggaatgtgtgacctggattgtgctcaaggaacccatcagcgtcagcagcgagcaggtgttgaaattccgtaaacttaacttcaatggggagggtgaacccgaagaactgatggtggacaactggcgcccagctcagccactgaagaacaggcaaatcaaagcttccttcaaatga

SEQ ID NO: 211079 - DNA, 1506 bp, Artificial Sequence
  Description of Artificial Sequence: Synthetic Construct
atggtgagcaagggcgccgagctgttcaccggcatcgtgcccatcctgatcgagctgaatggcgatgtgaatggccacaagttcagcgtgagcggcgagggcgagggcgatgccacctacggcaagctgaccctgaagttcatctgcaccaccggcaagctgcctgtgccctggcccaccctggtgaccaccctgagctacggcgtgcagtgcttctcacgctaccccgatcacatgaagcagcacgacttcttcaagagcgccatgcctgagggctacatccaggagcgcaccatcttcttcgaggatgacggcaactacaagtcgcgcgccgaggtgaagttcgagggcgataccctggtgaatcgcatcgagctgaccggcaccgatttcaaggaggatggcaacatcctgggcaataagatggagtacaactacaacgcccacaatgtgtacatcatgaccgacaaggccaagaatggcatcaaggtgaacttcaagatccgccacaacatcgaggatggcagcgtgcagctggccgaccactaccagcagaatacccccatcggcgatggccctgtgctgctgcccgataaccactacctgtccacccagagcgccctgtccaaggaccccaacgagaagcgcgatcacatgatctacttcggcttcgtgaccgccgccgccatcacccacggcatggatgagctgtacaagggatctggttcccatcactgggggtacggcaaacacaacggacctgagcactggcataaggacttccccattgccaagggagagcgccagtcccctgttgacatcgacactcatacagccaagtatgacccttccctgaagcccctgtctgtttcctatgatcaagcaacttccctgaggatcctcaacaatggtcatgctttcaacgtggagtttgatgactctcaggacaaagcagtgctcaagggaggacccctggatggcacttacagattgattcagtttcactttcactggggttcacttgatggacaaggttcagagcatactgtggataaaaagaaatatgctgcagaacttcacttggttcactggaacaccaaatatggggattttgggaaagctgtgcagcaacctgatggactggccgttctaggtatttttttgaaggttggcagcgctaaaccgggccatcagaaagttgttgatgtgctggattccattaaaacaaagggcaagtgtgctgacttcactaactacgatcctcgtggcctccttcctgattccctggattactggacctacccaggctcactgaccacccctcctcttctggaatgtgtgacctggattgtgctcaaggaacccatcagcgtcagcagcgagcaggtgttgaaattccgtaaacttaacttcaatggggagggtgaacccgaagaactgatggtggacaactggcgcccagctcagccactgaagaacaggcaaatcaaagcttccttcaaatga

SEQ ID NO: 211080 - DNA, 1506 bp, Artificial Sequence
  Description of Artificial Sequence: Synthetic Construct
atggtgagcaagggcgccgagctgttcaccggcatcgtgcccatcctgatcgagctgaatggcgatgtgaatggccacaagttcagcgtgagcggcgagggcgagggcgatgccacctacggcaagctgaccctgaagttcatctgcaccaccggcaagctgcctgtgccctggcccaccctggtgaccaccctgagctacggcgtgcagtgcttctcacgctaccccgatcacatgaagcagcacgacttcttcaagagcgccatgcctgagggctacatccaggagcgcaccatcttcttcgaggatgacggcaactacaagtcgcgcgccgaggtgaagttcgagggcgataccctggtgaatcgcatcgagctgaccggcaccgatttcaaggaggatggcaacatcctgggcaataagatggagtacaactacaacgcccacaatgtgtacatcatgaccgacaaggccaagaatggcatcaaggtgaacttcaagatccgccacaacatcgaggatggcagcgtgcagctggccgaccactaccagcagaatacccccatcggcgatggccctgtgctgctgcccgataaccactacctgtccacccagagcgccctgtccaaggaccccaacgagaagcgcgatcacatgatctacttcggcttcgtgaccgccgccgccatcacccacggcatggatgagctgtacaagggatctggttcccatcactgggggtacggcaaacacaacggacctgagcactggcataaggacttccccattgccaagggagagcgccagtcccctgttgacatcgacactcatacagccaagtatgacccttccctgaagcccctgtctgtttcctatgatcaagcaacttccctgaggatcctcaacaatggtcatgctttcaacgtggagtttgatgactctcaggacaaagcagtgctcaagggaggacccctggatggcacttacagattgattcagtttcactttcactggggttcacttgatggacaaggttcagagcatactgtggataaaaagaaatatgctgcagaacttcacttggttcactggaacaccaaatatggggattttgggaaagctgtgcagcaacctgatggactggccgttctaggtatttttttgaaggttggcagcgctaaaccgggccatcagaaagttgttgatgtgctggattccattaaaacaaagggcaagagtgctgacttcactaacttcgatcctcgtggcctccttcctgaatccctggattactggacctacccaggctcactgaccacccctcctcttctggaatgtgtgacctggattgtgctcaaggaacccatcagcgtcagcagcgagcaggtgttgaaattccgtaaacttaacttcaatggggagggtgaacccgaagaactgatggtggacaactggcgcccagctcagccactgaagaacaggcaaatcaaagcttccttcaaatga

SEQ ID NO: 211081 - DNA, 1506 bp, Artificial Sequence
  Description of Artificial Sequence: Synthetic Construct
atggtgagcaagggcgccgagctgttcaccggcatcgtgcccatcctgatcgagctgaatggcgatgtgaatggccacaagttcagcgtgagcggcgagggcgagggcgatgccacctacggcaagctgaccctgaagttcatctgcaccaccggcaagctgcctgtgccctggcccaccctggtgaccaccctgagctacggcgtgcagtgcttctcacgctaccccgatcacatgaagcagcacgacttcttcaagagcgccatgcctgagggctacatccaggagcgcaccatcttcttcgaggatgacggcaactacaagtcgcgcgccgaggtgaagttcgagggcgataccctggtgaatcgcatcgagctgaccggcaccgatttcaaggaggatggcaacatcctgggcaataagatggagtacaactacaacgcccacaatgtgtacatcatgaccgacaaggccaagaatggcatcaaggtgaacttcaagatccgccacaacatcgaggatggcagcgtgcagctggccgaccactaccagcagaatacccccatcggcgatggccctgtgctgctgcccgataaccactacctgtccacccagagcgccctgtccaaggaccccaacgagaagcgcgatcacatgatctacttcggcttcgtgaccgccgccgccatcacccacggcatggatgagctgtacaagggatctggttcccatcactgggggtacggcaaacacaacggacctgagcactggcataaggacttccccattgccaagggagagctccagtcccctgttgacatcgacactcatacagccaagtatgacccttccctgaagcccctgtctgtttcctatgatcaagcaacttccctgaggatcctcaacaatggtcatgctttcaacgtggagtttgatgactctcaggacaaagcagtgctcaagggaggacccctggatggcatttacagattgattcagtttcactttcactggggttcacttgatggacaaggttcagagcatactgtggataaaaagaaatatgctgcagaacttcacttggtttactggaacaccaaatatggggattttgggaaagctgtgcagcaacctgatggactggccgttctaggtatttttttgaaggttggcagcgctaaaccgggccttcagaaagttgttgatgtgctggattccattaaaacaaagggcaagagtgctgacttcactaacttcgatcctcgtggcctccttcctgaatccctggattactggacctacccaggctcactgaccacccctcctcttctggaatgtgtgacctggattgtgctcaaggaacccatcagcgtcagcagcgagcaggtgttgaaattccgtaaacttaacttcaatggggagggtgaacccgaagaactgatggtggacaactggcgcccagctcagccactgaaggacaggcaaatcaaagcttccttcaaatga

SEQ ID NO: 211082 - DNA, 2277 bp, Artificial Sequence
  Description of Artificial Sequence: Synthetic Construct
atggtgagcaagggcgccgagctgttcaccggcatcgtgcccatcctgatcgagctgaatggcgatgtgaatggccacaagttcagcgtgagcggcgagggcgagggcgatgccacctacggcaagctgaccctgaagttcatctgcaccaccggcaagctgcctgtgccctggcccaccctggtgaccaccctgagctacggcgtgcagtgcttctcacgctaccccgatcacatgaagcagcacgacttcttcaagagcgccatgcctgagggctacatccaggagcgcaccatcttcttcgaggatgacggcaactacaagtcgcgcgccgaggtgaagttcgagggcgataccctggtgaatcgcatcgagctgaccggcaccgatttcaaggaggatggcaacatcctgggcaataagatggagtacaactacaacgcccacaatgtgtacatcatgaccgacaaggccaagaatggcatcaaggtgaacttcaagatccgccacaacatcgaggatggcagcgtgcagctggccgaccactaccagcagaatacccccatcggcgatggccctgtgctgctgcccgataaccactacctgtccacccagagcgccctgtccaaggaccccaacgagaagcgcgatcacatgatctacttcggcttcgtgaccgccgccgccatcacccacggcatggatgagctgtacaagggatcctcccatcactgggggtacggcaaacacaacggacctgagcactggcataaggacttccccattgccaagggagagcgccagtcccctgttgacatcgacactcatacagccaagtatgacccttccctgaagcccctgtctgtttcctatgatcaagcaacttccctgaggaacctcaacaatggtcatgctttcaacgtggagtttgatgactctcaggacaaagcagtgctcaagggaggacccctggatggcacttacagattgattcagtttcactttcactggggttcacttgatggacaaggttcagagcatactgtggataaaaagaaatatgctgcagaacttcacttggttcactggaacaccaaatatggggattttgggaaagctgtgcagcaacctgatggactggccgttctaggtatttttttgaaggttggcagcgctaaaccgggccttcagaaagttgttgatgtgctggattccattaaaacaaagggcaagagtgctgacttcactaacttcgatcctcgtggcctccttcctgaatccctggattactggacctacccaggctcactgaccacccctcctcttctggaatgtgtgacctggattgtgctcaaggaacccatcagcgtcagcagcgagcaggtgttgaaattccgtaaacttaacttcaatggggagggtgaacccgaagaactgatggtggacaactggcgcccagctcagccactgaagaacaggcaaatcaaagcttccttcaaaagtctagatggagctactaacttcagcctgctgaagcaggctggagacgtggaggagaaccctggacctttgagcaagggcgaggaggacaacatggccatcatcaaggagttcatgcgcttcaaggtgcacatggagggctccgtgaacggccacgagttcgagatcgagggcgagggcgagggccgcccctacgagggcacccagaccgccaagctgaaggtgaccaagggcggccccctgcccttcgcctgggacatcctgtcccctcagttcatgtacggctccaaggcctacgtgaagcaccccgccgacatccccgactacttgaagctgtccttccccgagggcttcaagtgggagcgcgtgatgaacttcgaggacggcggcgtggtgaccgtgacccaggactcctccctgcaggacggcgagttcatctacaaggtgaagctgcgcggcaccaacttcccctccgacggccccgtaatgcagaagaagaccatgggctgggaggcctcctccgagcggatgtaccccgaggacggcgccctgaagggcgagatcaagcagaggctgaagctgaaggacggcggccactacgacgccgaggtcaagaccacctacaaggccaagaagcccgtgcagctgcccggcgcctacaacgtcaacatcaagctggacatcacctcccacaacgaggactacaccatcgtggaacagtacgagcgcgccgagggccgccactccaccggcggcatggacgagctgtacaagtaa

SEQ ID NO: 211083 - DNA, 2277 bp, Artificial Sequence
  Description of Artificial Sequence: Synthetic Construct
atggtgagcaagggcgccgagctgttcaccggcatcgtgcccatcctgatcgagctgaatggcgatgtgaatggccacaagttcagcgtgagcggcgagggcgagggcgatgccacctacggcaagctgaccctgaagttcatctgcaccaccggcaagctgcctgtgccctggcccaccctggtgaccaccctgagctacggcgtgcagtgcttctcacgctaccccgatcacatgaagcagcacgacttcttcaagagcgccatgcctgagggctacatccaggagcgcaccatcttcttcgaggatgacggcaactacaagtcgcgcgccgaggtgaagttcgagggcgataccctggtgaatcgcatcgagctgaccggcaccgatttcaaggaggatggcaacatcctgggcaataagatggagtacaactacaacgcccacaatgtgtacatcatgaccgacaaggccaagaatggcatcaaggtgaacttcaagatccgccacaacatcgaggatggcagcgtgcagctggccgaccactaccagcagaatacccccatcggcgatggccctgtgctgctgcccgataaccactacctgtccacccagagcgccctgtccaaggaccccaacgagaagcgcgatcacatgatctacttcggcttcgtgaccgccgccgccatcacccacggcatggatgagctgtacaagggatcctcccatcactgggggtacggcaaacacaacggacctgagcactggcataaggacttccccattgccaagggagagcgccagtcccctgttgacatcgacactcatacagccaagtatgacccttccctgaagcccctgtctgtttcctatgatcaagcaacttccctgaggatcctcaacaatgatcatgctttcaacgtggagtttgatgactctcaggacaaagcagtgctcaagggaggacccctggatggcacttacagattgattcagtttcactttcactggggttcacttgatggacaaggttcagagcatactgtggataaaaagaaatatgctgcagaacttcacttggttcactggaacaccaaatatggggattttgggaaagctgtgcagcaacctgatggactggccgttctaggtatttttttgaaggttggcagcgctaaaccgggccttcagaaagttgttgatgtgctggattccattaaaacaaagggcaagagtgctgacttcactaacttcgatcctcgtggcctccttcctgaatccctggattactggacctacccaggctcactgaccacccctcctcttctggaatgtgtgacctggattgtgctcaaggaacccatcagcgtcagcagcgagcaggtgttgaaattccgtaaacttaacttcaatggggagggtgaacccgaagaactgatggtggacaactggcgcccagctcagccactgaagaacaggcaaatcaaagcttccttcaaaagtctagatggagctactaacttcagcctgctgaagcaggctggagacgtggaggagaaccctggacctttgagcaagggcgaggaggacaacatggccatcatcaaggagttcatgcgcttcaaggtgcacatggagggctccgtgaacggccacgagttcgagatcgagggcgagggcgagggccgcccctacgagggcacccagaccgccaagctgaaggtgaccaagggcggccccctgcccttcgcctgggacatcctgtcccctcagttcatgtacggctccaaggcctacgtgaagcaccccgccgacatccccgactacttgaagctgtccttccccgagggcttcaagtgggagcgcgtgatgaacttcgaggacggcggcgtggtgaccgtgacccaggactcctccctgcaggacggcgagttcatctacaaggtgaagctgcgcggcaccaacttcccctccgacggccccgtaatgcagaagaagaccatgggctgggaggcctcctccgagcggatgtaccccgaggacggcgccctgaagggcgagatcaagcagaggctgaagctgaaggacggcggccactacgacgccgaggtcaagaccacctacaaggccaagaagcccgtgcagctgcccggcgcctacaacgtcaacatcaagctggacatcacctcccacaacgaggactacaccatcgtggaacagtacgagcgcgccgagggccgccactccaccggcggcatggacgagctgtacaagtaa

SEQ ID NO: 211084 - DNA, 2277 bp, Artificial Sequence
  Description of Artificial Sequence: Synthetic Construct
atggtgagcaagggcgccgagctgttcaccggcatcgtgcccatcctgatcgagctgaatggcgatgtgaatggccacaagttcagcgtgagcggcgagggcgagggcgatgccacctacggcaagctgaccctgaagttcatctgcaccaccggcaagctgcctgtgccctggcccaccctggtgaccaccctgagctacggcgtgcagtgcttctcacgctaccccgatcacatgaagcagcacgacttcttcaagagcgccatgcctgagggctacatccaggagcgcaccatcttcttcgaggatgacggcaactacaagtcgcgcgccgaggtgaagttcgagggcgataccctggtgaatcgcatcgagctgaccggcaccgatttcaaggaggatggcaacatcctgggcaataagatggagtacaactacaacgcccacaatgtgtacatcatgaccgacaaggccaagaatggcatcaaggtgaacttcaagatccgccacaacatcgaggatggcagcgtgcagctggccgaccactaccagcagaatacccccatcggcgatggccctgtgctgctgcccgataaccactacctgtccacccagagcgccctgtccaaggaccccaacgagaagcgcgatcacatgatctacttcggcttcgtgaccgccgccgccatcacccacggcatggatgagctgtacaagggatcctcccatcactgggggtacggcaaacacaacggacctgagcactggcataaggacttccccattgccaagggagagcgccagtcccctgttgacatcgacactcatacagccaagtatgacccttccctgaagcccctgtctgtttcctatgatcaagcaacttccctgaggatcctcaacaatggtcatgctttcaacgtggagtttgatgactctcaggacaaagcagtgctcaagggaggacccctggatggcacttacagattgattcagtttcactttcactggggttcacttgatggacaaggttcagagcatactgtggataaaaagaaatatgctgcagaacttcacttggtttactggaacaccaaatatggggattttgggaaagctgtgcagcaacctgatggactggccgttctaggtatttttttgaaggttggcagcgctaaaccgggccttcagaaagttgttgatgtgctggattccattaaaacaaagggcaagagtgctgacttcactaacttcgatcctcgtggcctccttcctgaatccctggattactggacctacccaggctcactgaccacccctcctcttctggaatgtgtgacctggattgtgctcaaggaacccatcagcgtcagcagcgagcaggtgttgaaattccgtaaacttaacttcaatggggagggtgaacccgaagaactgatggtggacaactggcgcccagctcagccactgaagaacaggcaaatcaaagcttccttcaaaagtctagatggagctactaacttcagcctgctgaagcaggctggagacgtggaggagaaccctggacctttgagcaagggcgaggaggacaacatggccatcatcaaggagttcatgcgcttcaaggtgcacatggagggctccgtgaacggccacgagttcgagatcgagggcgagggcgagggccgcccctacgagggcacccagaccgccaagctgaaggtgaccaagggcggccccctgcccttcgcctgggacatcctgtcccctcagttcatgtacggctccaaggcctacgtgaagcaccccgccgacatccccgactacttgaagctgtccttccccgagggcttcaagtgggagcgcgtgatgaacttcgaggacggcggcgtggtgaccgtgacccaggactcctccctgcaggacggcgagttcatctacaaggtgaagctgcgcggcaccaacttcccctccgacggccccgtaatgcagaagaagaccatgggctgggaggcctcctccgagcggatgtaccccgaggacggcgccctgaagggcgagatcaagcagaggctgaagctgaaggacggcggccactacgacgccgaggtcaagaccacctacaaggccaagaagcccgtgcagctgcccggcgcctacaacgtcaacatcaagctggacatcacctcccacaacgaggactacaccatcgtggaacagtacgagcgcgccgagggccgccactccaccggcggcatggacgagctgtacaagtaa

SEQ ID NO: 211085 - DNA, 2277 bp, Artificial Sequence
  Description of Artificial Sequence: Synthetic Construct
atggtgagcaagggcgccgagctgttcaccggcatcgtgcccatcctgatcgagctgaatggcgatgtgaatggccacaagttcagcgtgagcggcgagggcgagggcgatgccacctacggcaagctgaccctgaagttcatctgcaccaccggcaagctgcctgtgccctggcccaccctggtgaccaccctgagctacggcgtgcagtgcttctcacgctaccccgatcacatgaagcagcacgacttcttcaagagcgccatgcctgagggctacatccaggagcgcaccatcttcttcgaggatgacggcaactacaagtcgcgcgccgaggtgaagttcgagggcgataccctggtgaatcgcatcgagctgaccggcaccgatttcaaggaggatggcaacatcctgggcaataagatggagtacaactacaacgcccacaatgtgtacatcatgaccgacaaggccaagaatggcatcaaggtgaacttcaagatccgccacaacatcgaggatggcagcgtgcagctggccgaccactaccagcagaatacccccatcggcgatggccctgtgctgctgcccgataaccactacctgtccacccagagcgccctgtccaaggaccccaacgagaagcgcgatcacatgatctacttcggcttcgtgaccgccgccgccatcacccacggcatggatgagctgtacaagggatcctcccatcactgggggtacggcaaacacaacggacctgagcactggcataaggacttccccattgccaagggagagcgccagtcccctgttgacatcgacactcatacagccaagtatgacccttccctgaagcccctgtctgtttcctatgatcaagcaacttccctgaggatcctcaacaatgatcatgctttcaacgtggagtttgatgactctcaggacaaagcagtgctcaagggaggacccctggatggcacttacagattgattcagtttcactttcactggggttcacttgatggacaaggttcagagcatactgtggataaaaagaaatatgctgcagaacttcacttggttcactggaacaccaaatatggggattttgggaaagctgtgcagcaacctgatggactggccgttctaggtatttttttgaaggttggcagcgctaaaccgggccttcagaaagttgttgatgtgctggattccattaaaacaaagggcaagagtgctgacttcactaacttcgatcctcgtggcctccttcctgaatccctggattactggacctacccaggctcactgaccacccctcctcttctggaatgtgtgacctggattgtgctcaaggaacccatcagcgtcagcagcgagcaggtgttgaaattccgtaaacttaacttcaatggggagggtgaacccgaagaactgcttgtggacaactggcgcccagctcagccactgaagaacaggcaaatcaaagcttccttcaaaagtctagatggagctactaacttcagcctgctgaagcaggctggagacgtggaggagaaccctggacctttgagcaagggcgaggaggacaacatggccatcatcaaggagttcatgcgcttcaaggtgcacatggagggctccgtgaacggccacgagttcgagatcgagggcgagggcgagggccgcccctacgagggcacccagaccgccaagctgaaggtgaccaagggcggccccctgcccttcgcctgggacatcctgtcccctcagttcatgtacggctccaaggcctacgtgaagcaccccgccgacatccccgactacttgaagctgtccttccccgagggcttcaagtgggagcgcgtgatgaacttcgaggacggcggcgtggtgaccgtgacccaggactcctccctgcaggacggcgagttcatctacaaggtgaagctgcgcggcaccaacttcccctccgacggccccgtaatgcagaagaagaccatgggctgggaggcctcctccgagcggatgtaccccgaggacggcgccctgaagggcgagatcaagcagaggctgaagctgaaggacggcggccactacgacgccgaggtcaagaccacctacaaggccaagaagcccgtgcagctgcccggcgcctacaacgtcaacatcaagctggacatcacctcccacaacgaggactacaccatcgtggaacagtacgagcgcgccgagggccgccactccaccggcggcatggacgagctgtacaagtaa

SEQ ID NO: 211086 - DNA, 2277 bp, Artificial Sequence
  Description of Artificial Sequence: Synthetic Construct
atggtgagcaagggcgccgagctgttcaccggcatcgtgcccatcctgatcgagctgaatggcgatgtgaatggccacaagttcagcgtgagcggcgagggcgagggcgatgccacctacggcaagctgaccctgaagttcatctgcaccaccggcaagctgcctgtgccctggcccaccctggtgaccaccctgagctacggcgtgcagtgcttctcacgctaccccgatcacatgaagcagcacgacttcttcaagagcgccatgcctgagggctacatccaggagcgcaccatcttcttcgaggatgacggcaactacaagtcgcgcgccgaggtgaagttcgagggcgataccctggtgaatcgcatcgagctgaccggcaccgatttcaaggaggatggcaacatcctgggcaataagatggagtacaactacaacgcccacaatgtgtacatcatgaccgacaaggccaagaatggcatcaaggtgaacttcaagatccgccacaacatcgaggatggcagcgtgcagctggccgaccactaccagcagaatacccccatcggcgatggccctgtgctgctgcccgataaccactacctgtccacccagagcgccctgtccaaggaccccaacgagaagcgcgatcacatgatctacttcggcttcgtgaccgccgccgccatcacccacggcatggatgagctgtacaagggatcctcccatcactgggggtacggcaaacacaacggacctgagcactggcataaggacttccccattgccaagggagagcgccagtcccctgttgacatcgacactcatacagccaagtatgacccttccctgaagcccctgtctgtttcctatgatcaagcaacttccctgaggatcctcaacaatggtcatgctttcaacgtggagtttgatgactctcaggacaaaattgtgctcaagggaggacccctggatggcacttacagattgattcagtttcactttcactggggttcacttgatggacaaggttcagagcatactgtggataaaaagaaatatgctgcagaacttcacttggttcactggaacaccaaatatggggattttgggaaagctgtgcagcaacctgatggactggccgttctaggtatttttttgaaggttggcagcgctaaaccgggccttcagaaagttgttgatgtgctggattccattaaaacaaagggcaagagtgctgacttcactaacttcgatcctcgtggcctccttcctgaatccctggattactggacctacccaggctcactgaccacccctcctcttctggaatgtgtgacctggattgtgctcaaggaacccatcagcgtcagcagcgagcaggtgttgaaattccgtaaacttaacttcaatggggagggtgaacccgaagaactgatggtggacaactggcgcccagctcagtttctgaagaacaggcaaatcaaagcttccttcaaaagtctagatggagctactaacttcagcctgctgaagcaggctggagacgtggaggagaaccctggacctttgagcaagggcgaggaggacaacatggccatcatcaaggagttcatgcgcttcaaggtgcacatggagggctccgtgaacggccacgagttcgagatcgagggcgagggcgagggccgcccctacgagggcacccagaccgccaagctgaaggtgaccaagggcggccccctgcccttcgcctgggacatcctgtcccctcagttcatgtacggctccaaggcctacgtgaagcaccccgccgacatccccgactacttgaagctgtccttccccgagggcttcaagtgggagcgcgtgatgaacttcgaggacggcggcgtggtgaccgtgacccaggactcctccctgcaggacggcgagttcatctacaaggtgaagctgcgcggcaccaacttcccctccgacggccccgtaatgcagaagaagaccatgggctgggaggcctcctccgagcggatgtaccccgaggacggcgccctgaagggcgagatcaagcagaggctgaagctgaaggacggcggccactacgacgccgaggtcaagaccacctacaaggccaagaagcccgtgcagctgcccggcgcctacaacgtcaacatcaagctggacatcacctcccacaacgaggactacaccatcgtggaacagtacgagcgcgccgagggccgccactccaccggcggcatggacgagctgtacaagtaa

SEQ ID NO: 211087 - DNA, 2277 bp, Artificial Sequence
  Description of Artificial Sequence: Synthetic Construct
atggtgagcaagggcgccgagctgttcaccggcatcgtgcccatcctgatcgagctgaatggcgatgtgaatggccacaagttcagcgtgagcggcgagggcgagggcgatgccacctacggcaagctgaccctgaagttcatctgcaccaccggcaagctgcctgtgccctggcccaccctggtgaccaccctgagctacggcgtgcagtgcttctcacgctaccccgatcacatgaagcagcacgacttcttcaagagcgccatgcctgagggctacatccaggagcgcaccatcttcttcgaggatgacggcaactacaagtcgcgcgccgaggtgaagttcgagggcgataccctggtgaatcgcatcgagctgaccggcaccgatttcaaggaggatggcaacatcctgggcaataagatggagtacaactacaacgcccacaatgtgtacatcatgaccgacaaggccaagaatggcatcaaggtgaacttcaagatccgccacaacatcgaggatggcagcgtgcagctggccgaccactaccagcagaatacccccatcggcgatggccctgtgctgctgcccgataaccactacctgtccacccagagcgccctgtccaaggaccccaacgagaagcgcgatcacatgatctacttcggcttcgtgaccgccgccgccatcacccacggcatggatgagctgtacaagggatcctcccatcactgggggtacggcaaacacaacggacctgagcactggcataaggacttccccattgccaagggagagcgccagtcccctgttgacatcgacactcatacagccaagtatgacccttccctgaagcccctgtctgtttcctatgatcaagcaacttccctgaggatcctcaacaatggtcatgctttcaacgtggagtttaaggactctcaggacaaagcagtgctcaagggaggacccctggatggcacttacagattgattcagtttcactttcactggggttcacttgatggacaaggttcagagcatactgtggataaaaagaaatatgctgcagaacttcacttggttcactggaacaccaaatatggggattttgggaaagctgtgcagcaacctgatggactggccgttctaggtatttttttgaaggttggcagcgctaaaccgggccttcagaaagttgttgatgtgctggattccattaaaacaaagggcaagagtgctgacttcactaacttcgatcctcgtggcctccttcctgaatccctggattactggttttacccaggctcactgaccacccctcctcttctggaatgtgtgacctggattgtgctcaaggaacccatcagcgtcagcagcgagcaggtgttgaaattccgtaaacttaacttcaatggggagggtgaacccgaagaactgatggtggacaactggcgcccagctcagccactgaagaacaggcaaatcaaagcttccttcaaaagtctagatggagctactaacttcagcctgctgaagcaggctggagacgtggaggagaaccctggacctttgagcaagggcgaggaggacaacatggccatcatcaaggagttcatgcgcttcaaggtgcacatggagggctccgtgaacggccacgagttcgagatcgagggcgagggcgagggccgcccctacgagggcacccagaccgccaagctgaaggtgaccaagggcggccccctgcccttcgcctgggacatcctgtcccctcagttcatgtacggctccaaggcctacgtgaagcaccccgccgacatccccgactacttgaagctgtccttccccgagggcttcaagtgggagcgcgtgatgaacttcgaggacggcggcgtggtgaccgtgacccaggactcctccctgcaggacggcgagttcatctacaaggtgaagctgcgcggcaccaacttcccctccgacggccccgtaatgcagaagaagaccatgggctgggaggcctcctccgagcggatgtaccccgaggacggcgccctgaagggcgagatcaagcagaggctgaagctgaaggacggcggccactacgacgccgaggtcaagaccacctacaaggccaagaagcccgtgcagctgcccggcgcctacaacgtcaacatcaagctggacatcacctcccacaacgaggactacaccatcgtggaacagtacgagcgcgccgagggccgccactccaccggcggcatggacgagctgtacaagtaa

SEQ ID NO: 211088 - DNA, 2352 bp, Artificial Sequence
  Description of Artificial Sequence: Synthetic Construct
atgtacccatacgatgttccagattacgctggatcctcccatcactgggggtacggcaaacacaacggacctgagcactggcataaggacttccccattgccaagggagagcgccagtcccctgttgacatcgacactcatacagccaagtatgacccttccctgaagcccctgtctgtttcctatgatcaagcaacttccctgagaatcctcaacaatggtcatgctttcaacgtggagtttgatgactctcaggacaaagcagtgctcaagggaggacccctggatggcacttacagattgattcagtttcactttcactggggttcacttgatggacaaggttcagagcatactgtggataaaaagaaatatgctgcagaacttcacttggttcactggaacaccaaatatggggattttgggaaagctgtgcagcaacctgatggactggccgttctaggtatttttttgaaggttggcagcgctaaaccgggccatcagaaagttgttgatgtgctggattccattaaaacaaagggcaagagtgctgacttcactaacttcgatcctcgtggcctccttcctgaatccctggattactggacctacccaggctcactgaccacccctcctcttctggaatgtgtgacctggattgtgctcaaggaacccatcagcgtcagcagcgagcaggtgttgaaattccgtaaacttaacttcaatggggagggtgaacccgaagaactgatggtggacaactggcgcccagctcagccactgaagaacaggcaaatcaaagcttccttcaaaggatccggttcaggggactacaaagacgatgacgacaaggtgagcaagggcgaggagctgttcaccggggtggtgcccatcctggtcgagctggacggcgacgtaaacggccacaagttcagcgtgtccggcgagggcgagggcgatgccacctacggcaagctgaccctgaagttcatctgcaccaccggcaagctgcccgtgccctggcccaccctcgtgaccaccctgacctacggcgtgcagtgcttcagccgctaccccgaccacatgaagcagcacgacttcttcaagtccgccatgcccgaaggctacgtccaggagcgcaccatcttcttcaaggacgacggcaactacaagacccgcgccgaggtgaagttcgagggcgacaccctggtgaaccgcatcgagctgaagggcatcgacttcaaggaggacggcaacatcctggggcacaagctggagtacaactacaacagccacaacgtctatatcatggccgacaagcagaagaacggcatcaaggtgaacttcaagatccgccacaacatcgaggacggcagcgtgcagctcgccgaccactaccagcagaacacccccatcggcgacggccccgtgctgctgcccgacaaccactacctgagcacccagtccaagctgagcaaagaccccaacgagaagcgcgatcacatggtcctgctggagttcgtgaccgccgccgggatcactctcggcatggacgagctgtacaagggatccggtagtctagatggagctactaacttcagcctgctgaagcaggctggagacgtggaggagaaccctggacctttgagcaagggcgaggaggacaacatggccatcatcaaggagttcatgcgcttcaaggtgcacatggagggctccgtgaacggccacgagttcgagatcgagggcgagggcgagggccgcccctacgagggcacccagaccgccaagctgaaggtgaccaagggcggccccctgcccttcgcctgggacatcctgtcccctcagttcatgtacggctccaaggcctacgtgaagcaccccgccgacatccccgactacttgaagctgtccttccccgagggcttcaagtgggagcgcgtgatgaacttcgaggacggcggcgtggtgaccgtgacccaggactcctccctgcaggacggcgagttcatctacaaggtgaagctgcgcggcaccaacttcccctccgacggccccgtaatgcagaagaagaccatgggctgggaggcctcctccgagcggatgtaccccgaggacggcgccctgaagggcgagatcaagcagaggctgaagctgaaggacggcggccactacgacgccgaggtcaagaccacctacaaggccaagaagcccgtgcagctgcccggcgcctacaacgtcaacatcaagctggacatcacctcccacaacgaggactacaccatcgtggaacagtacgagcgcgccgagggccgccactccaccggcggcatggacgagctgtacaagtaa

SEQ ID NO: 211089 - DNA, 2277 bp, Artificial Sequence
  Description of Artificial Sequence: Synthetic Construct
atggtgagcaagggcgccgagctgttcaccggcatcgtgcccatcctgatcgagctgaatggcgatgtgaatggccacaagttcagcgtgagcggcgagggcgagggcgatgccacctacggcaagctgaccctgaagttcatctgcaccaccggcaagctgcctgtgccctggcccaccctggtgaccaccctgagctacggcgtgcagtgcttctcacgctaccccgatcacatgaagcagcacgacttcttcaagagcgccatgcctgagggctacatccaggagcgcaccatcttcttcgaggatgacggcaactacaagtcgcgcgccgaggtgaagttcgagggcgataccctggtgaatcgcatcgagctgaccggcaccgatttcaaggaggatggcaacatcctgggcaataagatggagtacaactacaacgcccacaatgtgtacatcatgaccgacaaggccaagaatggcatcaaggtgaacttcaagatccgccacaacatcgaggatggcagcgtgcagctggccgaccactaccagcagaatacccccatcggcgatggccctgtgctgctgcccgataaccactacctgtccacccagagcgccctgtccaaggaccccaacgagaagcgcgatcacatgatctacttcggcttcgtgaccgccgccgccatcacccacggcatggatgagctgtacaagggatcctcccatcactgggggtacggcaaacacaacggacctgagcactggcataaggacttccccattgccaagggagagctccagtcccctgttgacatcgacactcatacagccaagtatgacccttccctgaagcccctgtctgtttcctatgatcaagcaacttccctgaggatcctcaacaatggtcatgctttcaacgtggagtttgatgactctcaggacaaagcagtgctcaagggaggacccctggatggcacttacagattgattcagtttcactttcactggggttcacttgatggacaaggttcagagcatactgtggataaaaagaaatatgctgcagaacttcacttggtttactggaacaccaaatatggggattttgggaaagctgtgcagcaacctgatggactggccgttctaggtatttttttgaaggttggcagcgctaaaccgggccttcagaaagttgttgatgtgctggattccattaaaacaaagggcaagagtgctgacttcactaacttcgatcctcgtggcctccttcctgaatccctggattactggacctacccaggctcactgaccacccctcctcttctggaatgtgtgacctggattgtgctcaaggaacccatcagcgtcagcagcgagcaggtgttgaaattccgtaaacttaacttcaatggggagggtgaacccgaagaactgatggtggacaactggcgcccagctcagccactgaagaacaggcaaatcaaagcttccttcaaaagtctagatggagctactaacttcagcctgctgaagcaggctggagacgtggaggagaaccctggacctttgagcaagggcgaggaggacaacatggccatcatcaaggagttcatgcgcttcaaggtgcacatggagggctccgtgaacggccacgagttcgagatcgagggcgagggcgagggccgcccctacgagggcacccagaccgccaagctgaaggtgaccaagggcggccccctgcccttcgcctgggacatcctgtcccctcagttcatgtacggctccaaggcctacgtgaagcaccccgccgacatccccgactacttgaagctgtccttccccgagggcttcaagtgggagcgcgtgatgaacttcgaggacggcggcgtggtgaccgtgacccaggactcctccctgcaggacggcgagttcatctacaaggtgaagctgcgcggcaccaacttcccctccgacggccccgtaatgcagaagaagaccatgggctgggaggcctcctccgagcggatgtaccccgaggacggcgccctgaagggcgagatcaagcagaggctgaagctgaaggacggcggccactacgacgccgaggtcaagaccacctacaaggccaagaagcccgtgcagctgcccggcgcctacaacgtcaacatcaagctggacatcacctcccacaacgaggactacaccatcgtggaacagtacgagcgcgccgagggccgccactccaccggcggcatggacgagctgtacaagtaa

SEQ ID NO: 211090 - DNA, 2277 bp, Artificial Sequence
  Description of Artificial Sequence: Synthetic Construct
atggtgagcaagggcgccgagctgttcaccggcatcgtgcccatcctgatcgagctgaatggcgatgtgaatggccacaagttcagcgtgagcggcgagggcgagggcgatgccacctacggcaagctgaccctgaagttcatctgcaccaccggcaagctgcctgtgccctggcccaccctggtgaccaccctgagctacggcgtgcagtgcttctcacgctaccccgatcacatgaagcagcacgacttcttcaagagcgccatgcctgagggctacatccaggagcgcaccatcttcttcgaggatgacggcaactacaagtcgcgcgccgaggtgaagttcgagggcgataccctggtgaatcgcatcgagctgaccggcaccgatttcaaggaggatggcaacatcctgggcaataagatggagtacaactacaacgcccacaatgtgtacatcatgaccgacaaggccaagaatggcatcaaggtgaacttcaagatccgccacaacatcgaggatggcagcgtgcagctggccgaccactaccagcagaatacccccatcggcgatggccctgtgctgctgcccgataaccactacctgtccacccagagcgccctgtccaaggaccccaacgagaagcgcgatcacatgatctacttcggcttcgtgaccgccgccgccatcacccacggcatggatgagctgtacaagggatcctcccatcactgggggtacggcaaacacaacggacctgagcactggcataaggacttccccattgccaagggagagcgccagtcccctgttgacatcgacactcatacagccaagtatgacccttccctgaagcccctgtctgtttcctatgatcaagcaacttccctgaggatcctcaacaatggtcatgctttcaacgtggagtttgatgactctcaggacaaagcagtgctcaagggaggacccctggatggcatttacagattgattcagtttcactttcactggggttcacttgatggacaaggttcagagcatactgtggataaaaagaaatatgctgcagaacttcacttggtttactggaacaccaaatatggggattttgggaaagctgtgcagcaacctgatggactggccgttctaggtatttttttgaaggttggcagcgctaaaccgggccttcagaaagttgttgatgtgctggattccattaaaacaaagggcaagagtgctgacttcactaacttcgatcctcgtggcctccttcctgaatccctggattactggacctacccaggctcactgaccacccctcctcttctggaatgtgtgacctggattgtgctcaaggaacccatcagcgtcagcagcgagcaggtgttgaaattccgtaaacttaacttcaatggggagggtgaacccgaagaactgatggtggacaactggcgcccagctcagccactgaagaacaggcaaatcaaagcttccttcaaaagtctagatggagctactaacttcagcctgctgaagcaggctggagacgtggaggagaaccctggacctttgagcaagggcgaggaggacaacatggccatcatcaaggagttcatgcgcttcaaggtgcacatggagggctccgtgaacggccacgagttcgagatcgagggcgagggcgagggccgcccctacgagggcacccagaccgccaagctgaaggtgaccaagggcggccccctgcccttcgcctgggacatcctgtcccctcagttcatgtacggctccaaggcctacgtgaagcaccccgccgacatccccgactacttgaagctgtccttccccgagggcttcaagtgggagcgcgtgatgaacttcgaggacggcggcgtggtgaccgtgacccaggactcctccctgcaggacggcgagttcatctacaaggtgaagctgcgcggcaccaacttcccctccgacggccccgtaatgcagaagaagaccatgggctgggaggcctcctccgagcggatgtaccccgaggacggcgccctgaagggcgagatcaagcagaggctgaagctgaaggacggcggccactacgacgccgaggtcaagaccacctacaaggccaagaagcccgtgcagctgcccggcgcctacaacgtcaacatcaagctggacatcacctcccacaacgaggactacaccatcgtggaacagtacgagcgcgccgagggccgccactccaccggcggcatggacgagctgtacaagtaa

SEQ ID NO: 211091 - DNA, 2277 bp, Artificial Sequence
  Description of Artificial Sequence: Synthetic Construct
atggtgagcaagggcgccgagctgttcaccggcatcgtgcccatcctgatcgagctgaatggcgatgtgaatggccacaagttcagcgtgagcggcgagggcgagggcgatgccacctacggcaagctgaccctgaagttcatctgcaccaccggcaagctgcctgtgccctggcccaccctggtgaccaccctgagctacggcgtgcagtgcttctcacgctaccccgatcacatgaagcagcacgacttcttcaagagcgccatgcctgagggctacatccaggagcgcaccatcttcttcgaggatgacggcaactacaagtcgcgcgccgaggtgaagttcgagggcgataccctggtgaatcgcatcgagctgaccggcaccgatttcaaggaggatggcaacatcctgggcaataagatggagtacaactacaacgcccacaatgtgtacatcatgaccgacaaggccaagaatggcatcaaggtgaacttcaagatccgccacaacatcgaggatggcagcgtgcagctggccgaccactaccagcagaatacccccatcggcgatggccctgtgctgctgcccgataaccactacctgtccacccagagcgccctgtccaaggaccccaacgagaagcgcgatcacatgatctacttcggcttcgtgaccgccgccgccatcacccacggcatggatgagctgtacaagggatcctcccatcactgggggtacggcaaacacaacggacctgagcactggcataaggacttccccattgccaagggagagcgccagtcccctgttgacatcgacactcatacagccaagtatgacccttccctgaagcccctgtctgtttcctatgatcaagcaacttccctgaggatcctcaacaatggtcatgctttcaacgtggagtttgatgactctcaggacaaagcagtgctcaagggaggacccctggatggcacttacagattgattcagtttcactttcactggggttcacttgatggacaaggttcagagcatactgtggataaaaagaaatatgctgcagaacttcacttggtttactggaacaccaaatatggggattttgggaaagctgtgcagcaacctgatggactggccgttctaggtatttttttgaaggttggcagcgctaaaccgggccttcagaaagttgttgatgtgctggattccattaaaacaaagggcaagagtgctgacttcactaacttcgatcctcgtggcctccttcctgaatccctggattactggacctacccaggctcactgaccacccctcctcttctggaatgtgtgacctggattgtgctcaaggaacccatcagcgtcagcagcgagcaggtgttgaaattccgtaaacttaacttcaatggggagggtgaacccgaagaactgatggtggacaactggcgcccagctcagccactgaaggacaggcaaatcaaagcttccttcaaaagtctagatggagctactaacttcagcctgctgaagcaggctggagacgtggaggagaaccctggacctttgagcaagggcgaggaggacaacatggccatcatcaaggagttcatgcgcttcaaggtgcacatggagggctccgtgaacggccacgagttcgagatcgagggcgagggcgagggccgcccctacgagggcacccagaccgccaagctgaaggtgaccaagggcggccccctgcccttcgcctgggacatcctgtcccctcagttcatgtacggctccaaggcctacgtgaagcaccccgccgacatccccgactacttgaagctgtccttccccgagggcttcaagtgggagcgcgtgatgaacttcgaggacggcggcgtggtgaccgtgacccaggactcctccctgcaggacggcgagttcatctacaaggtgaagctgcgcggcaccaacttcccctccgacggccccgtaatgcagaagaagaccatgggctgggaggcctcctccgagcggatgtaccccgaggacggcgccctgaagggcgagatcaagcagaggctgaagctgaaggacggcggccactacgacgccgaggtcaagaccacctacaaggccaagaagcccgtgcagctgcccggcgcctacaacgtcaacatcaagctggacatcacctcccacaacgaggactacaccatcgtggaacagtacgagcgcgccgagggccgccactccaccggcggcatggacgagctgtacaagtaa

SEQ ID NO: 211092 - DNA, 2277 bp, Artificial Sequence
  Description of Artificial Sequence: Synthetic Construct
atggtgagcaagggcgccgagctgttcaccggcatcgtgcccatcctgatcgagctgaatggcgatgtgaatggccacaagttcagcgtgagcggcgagggcgagggcgatgccacctacggcaagctgaccctgaagttcatctgcaccaccggcaagctgcctgtgccctggcccaccctggtgaccaccctgagctacggcgtgcagtgcttctcacgctaccccgatcacatgaagcagcacgacttcttcaagagcgccatgcctgagggctacatccaggagcgcaccatcttcttcgaggatgacggcaactacaagtcgcgcgccgaggtgaagttcgagggcgataccctggtgaatcgcatcgagctgaccggcaccgatttcaaggaggatggcaacatcctgggcaataagatggagtacaactacaacgcccacaatgtgtacatcatgaccgacaaggccaagaatggcatcaaggtgaacttcaagatccgccacaacatcgaggatggcagcgtgcagctggccgaccactaccagcagaatacccccatcggcgatggccctgtgctgctgcccgataaccactacctgtccacccagagcgccctgtccaaggaccccaacgagaagcgcgatcacatgatctacttcggcttcgtgaccgccgccgccatcacccacggcatggatgagctgtacaagggatcctcccatcactgggggtacggcaaacacaacggacctgagcactggcataaggacttccccattgccaagggagagcgccagtcccctgttgacatcgacactcatacagccaagtatgacccttccctgaagcccctgtctgtttcctatgatcaagcaacttccctgaggatcctcaacaatggtcatgctttcaacgtggagtttgatttctctcaggacaaagcagtgctcaagggaggacccctggatggcacttacagattgattcagtttcactttcactggggttcacttgatggacaaggttcagagcatactgtggataaaaagaaatatgctgcagaacttcacttggttcactggaacaccaaatatggggattttgggaaagctgtgcagcaacctgatggactggccgttctaggtatttttttgaaggttggcagcgctaaaccgggccttcagaaagttgttgatgtgctggattccattaaaacaaagggcaagagtgctgacttcactaacttcgatcctcgtggcctccttcctgaatccctggattactggacctacccaggctcactgaccacccctcctcttctggaatgtgtgacctggattgtgctcaaggaacccatcagcgtcagcagcgagcaggtgttgaaattccgtaaacttaacttcaatggggagggtgaacccgaagaactgatgtttgacaactggcgcccagctcagccactgaagaacaggcaaatcaaagcttccttcaaaagtctagatggagctactaacttcagcctgctgaagcaggctggagacgtggaggagaaccctggacctttgagcaagggcgaggaggacaacatggccatcatcaaggagttcatgcgcttcaaggtgcacatggagggctccgtgaacggccacgagttcgagatcgagggcgagggcgagggccgcccctacgagggcacccagaccgccaagctgaaggtgaccaagggcggccccctgcccttcgcctgggacatcctgtcccctcagttcatgtacggctccaaggcctacgtgaagcaccccgccgacatccccgactacttgaagctgtccttccccgagggcttcaagtgggagcgcgtgatgaacttcgaggacggcggcgtggtgaccgtgacccaggactcctccctgcaggacggcgagttcatctacaaggtgaagctgcgcggcaccaacttcccctccgacggccccgtaatgcagaagaagaccatgggctgggaggcctcctccgagcggatgtaccccgaggacggcgccctgaagggcgagatcaagcagaggctgaagctgaaggacggcggccactacgacgccgaggtcaagaccacctacaaggccaagaagcccgtgcagctgcccggcgcctacaacgtcaacatcaagctggacatcacctcccacaacgaggactacaccatcgtggaacagtacgagcgcgccgagggccgccactccaccggcggcatggacgagctgtacaagtaa

SEQ ID NO: 211093 - DNA, 2277 bp, Artificial Sequence
  Description of Artificial Sequence: Synthetic Construct
atggtgagcaagggcgccgagctgttcaccggcatcgtgcccatcctgatcgagctgaatggcgatgtgaatggccacaagttcagcgtgagcggcgagggcgagggcgatgccacctacggcaagctgaccctgaagttcatctgcaccaccggcaagctgcctgtgccctggcccaccctggtgaccaccctgagctacggcgtgcagtgcttctcacgctaccccgatcacatgaagcagcacgacttcttcaagagcgccatgcctgagggctacatccaggagcgcaccatcttcttcgaggatgacggcaactacaagtcgcgcgccgaggtgaagttcgagggcgataccctggtgaatcgcatcgagctgaccggcaccgatttcaaggaggatggcaacatcctgggcaataagatggagtacaactacaacgcccacaatgtgtacatcatgaccgacaaggccaagaatggcatcaaggtgaacttcaagatccgccacaacatcgaggatggcagcgtgcagctggccgaccactaccagcagaatacccccatcggcgatggccctgtgctgctgcccgataaccactacctgtccacccagagcgccctgtccaaggaccccaacgagaagcgcgatcacatgatctacttcggcttcgtgaccgccgccgccatcacccacggcatggatgagctgtacaagggatcctcccatcactgggggtacggcaaacacaacggacctgagcactggcataaggacttccccattgccaagggagagcgccagtcccctgttgacatcgacactcatacagccaagtatgacccttccctgaagcccctgtctgtttcctatgatcaagcaacttccctgaggatcctcaacaatggtcatgctttcaacgtggagtttgatgactctcaggacaaagcagtgctcaagggaggacccctggatggcacttacagattgattcagtttcactttcactggggttcacttgatggacaaggttcagagcatactgtggataaaaagaaatatgctgcagaacttcacttggttcactggaacaccaaatatggggattttgggaaagctgtgcagcaacctgatggactggccgttctaggtatttttttgaaggttggcagcgctaaaccgggccttcagaaagttgttgatgtgctggattccattaaaacaaagggcaagagtgctgacttcactaacttcgatcctcgtggcctccttcctgaatccctggattactggacctacccaggctcactgaccacccctcctcttctggaatgtgtgacctggattgtgctcaaggaacccatcagcgtcagcagcgagcaggtgttgaaattccgtaaacttaacttcaatggggagggtgaacccgaagaactgatgtttgacaactggcgcccagctcagctactgaagaacaggcaaatcaaagcttccttcaaaagtctagatggagctactaacttcagcctgctgaagcaggctggagacgtggaggagaaccctggacctttgagcaagggcgaggaggacaacatggccatcatcaaggagttcatgcgcttcaaggtgcacatggagggctccgtgaacggccacgagttcgagatcgagggcgagggcgagggccgcccctacgagggcacccagaccgccaagctgaaggtgaccaagggcggccccctgcccttcgcctgggacatcctgtcccctcagttcatgtacggctccaaggcctacgtgaagcaccccgccgacatccccgactacttgaagctgtccttccccgagggcttcaagtgggagcgcgtgatgaacttcgaggacggcggcgtggtgaccgtgacccaggactcctccctgcaggacggcgagttcatctacaaggtgaagctgcgcggcaccaacttcccctccgacggccccgtaatgcagaagaagaccatgggctgggaggcctcctccgagcggatgtaccccgaggacggcgccctgaagggcgagatcaagcagaggctgaagctgaaggacggcggccactacgacgccgaggtcaagaccacctacaaggccaagaagcccgtgcagctgcccggcgcctacaacgtcaacatcaagctggacatcacctcccacaacgaggactacaccatcgtggaacagtacgagcgcgccgagggccgccactccaccggcggcatggacgagctgtacaagtaa

SEQ ID NO: 211094 - DNA, 2277 bp, Artificial Sequence
  Description of Artificial Sequence: Synthetic Construct
atggtgagcaagggcgccgagctgttcaccggcatcgtgcccatcctgatcgagctgaatggcgatgtgaatggccacaagttcagcgtgagcggcgagggcgagggcgatgccacctacggcaagctgaccctgaagttcatctgcaccaccggcaagctgcctgtgccctggcccaccctggtgaccaccctgagctacggcgtgcagtgcttctcacgctaccccgatcacatgaagcagcacgacttcttcaagagcgccatgcctgagggctacatccaggagcgcaccatcttcttcgaggatgacggcaactacaagtcgcgcgccgaggtgaagttcgagggcgataccctggtgaatcgcatcgagctgaccggcaccgatttcaaggaggatggcaacatcctgggcaataagatggagtacaactacaacgcccacaatgtgtacatcatgaccgacaaggccaagaatggcatcaaggtgaacttcaagatccgccacaacatcgaggatggcagcgtgcagctggccgaccactaccagcagaatacccccatcggcgatggccctgtgctgctgcccgataaccactacctgtccacccagagcgccctgtccaaggaccccaacgagaagcgcgatcacatgatctacttcggcttcgtgaccgccgccgccatcacccacggcatggatgagctgtacaagggatcctcccatcactgggggtacggcaaacacaacggacctgagcactggcataaggacttccccattgccaagggagagcgccagtcccctgttgacatcgacactcatacagccaagtatgacccttccctgaagcccctgtctgtttcctatgatcaagcaacttccctgaggatcctcaacaatggtcatgctttcaacgtggagtttgatttctctcaggacaaagcagtgctcaagggaggacccctggatggcacttacagattgattcagtttcactttcactggggttcacttgatggacaaggttcagagcatactgtggataaaaagaaatatgctgcagaacttcacttggttcactggaacaccaaatatggggattttgggaaagctgtgcagcaacctgatggactggccgttctaggtatttttttgaaggttggcagcgctaaaccgggccttcagaaagttgttgatgtgctggattccattaaaacaaagggcaagagtgctgacttcactaacttcgatcctcgtggcctccttcctgaatccctggattactggacctacccaggctcactgaccacccctcctcttctggaatgtgtgacctggattgtgctcaaggaacccatcagcgtcagcagcgagcaggtgttgaaattccgtaaacttaacttcaatggggagggtgaacccgaagaactgatggtggacaactggcgcccagctcagctactgaagaacaggcaaatcaaagcttccttcaaaagtctagatggagctactaacttcagcctgctgaagcaggctggagacgtggaggagaaccctggacctttgagcaagggcgaggaggacaacatggccatcatcaaggagttcatgcgcttcaaggtgcacatggagggctccgtgaacggccacgagttcgagatcgagggcgagggcgagggccgcccctacgagggcacccagaccgccaagctgaaggtgaccaagggcggccccctgcccttcgcctgggacatcctgtcccctcagttcatgtacggctccaaggcctacgtgaagcaccccgccgacatccccgactacttgaagctgtccttccccgagggcttcaagtgggagcgcgtgatgaacttcgaggacggcggcgtggtgaccgtgacccaggactcctccctgcaggacggcgagttcatctacaaggtgaagctgcgcggcaccaacttcccctccgacggccccgtaatgcagaagaagaccatgggctgggaggcctcctccgagcggatgtaccccgaggacggcgccctgaagggcgagatcaagcagaggctgaagctgaaggacggcggccactacgacgccgaggtcaagaccacctacaaggccaagaagcccgtgcagctgcccggcgcctacaacgtcaacatcaagctggacatcacctcccacaacgaggactacaccatcgtggaacagtacgagcgcgccgagggccgccactccaccggcggcatggacgagctgtacaagtaa

SEQ ID NO: 211095 - DNA, 2277 bp, Artificial Sequence
  Description of Artificial Sequence: Synthetic Construct
atggtgagcaagggcgccgagctgttcaccggcatcgtgcccatcctgatcgagctgaatggcgatgtgaatggccacaagttcagcgtgagcggcgagggcgagggcgatgccacctacggcaagctgaccctgaagttcatctgcaccaccggcaagctgcctgtgccctggcccaccctggtgaccaccctgagctacggcgtgcagtgcttctcacgctaccccgatcacatgaagcagcacgacttcttcaagagcgccatgcctgagggctacatccaggagcgcaccatcttcttcgaggatgacggcaactacaagtcgcgcgccgaggtgaagttcgagggcgataccctggtgaatcgcatcgagctgaccggcaccgatttcaaggaggatggcaacatcctgggcaataagatggagtacaactacaacgcccacaatgtgtacatcatgaccgacaaggccaagaatggcatcaaggtgaacttcaagatccgccacaacatcgaggatggcagcgtgcagctggccgaccactaccagcagaatacccccatcggcgatggccctgtgctgctgcccgataaccactacctgtccacccagagcgccctgtccaaggaccccaacgagaagcgcgatcacatgatctacttcggcttcgtgaccgccgccgccatcacccacggcatggatgagctgtacaagggatcctcccatcactgggggtacggcaaacacaacggacctgagcactggcataaggacttccccattgccaagggagagcgccagtcccctgttgacatcgacactcatacagccaagtatgacccttccctgaagcccctgtctgtttcctatgatcaagcaacttccctgaggatcctcaacaatggtcatgctttcaacgtggagtttcttgactctcaggacaaagcagtgctcaagggaggacccctggatggcaattacagattgattcagtttcactttcactggggttcacttgatggacaaggttcagagcatactgtggataaaaagaaatatgctgcagaacttcacttggttcactggaacaccaaatatggggattttgggaaagctgtgcagcaacctgatggactggccgttctaggtatttttttgaaggttggcagcgctaaaccgggccttcagaaagttgttgatgtgctggattccattaaaacaaagggcaagagtgctgacttcactaacttcgatcctcgtggcctccttcctgaatccctggattactggacctacccaggctcactgaccacccctcctcttctggaatgtgtgacctggattgtgctcaaggaacccatcagcgtcagcagcgagcaggtgttgaaattccgtaaacttaacttcaatggggagggtgaacccgaagaactgatggtggacaactggcgcccagctcagccactgaagaacaggcaaatcaaagcttccttcaaaagtctagatggagctactaacttcagcctgctgaagcaggctggagacgtggaggagaaccctggacctttgagcaagggcgaggaggacaacatggccatcatcaaggagttcatgcgcttcaaggtgcacatggagggctccgtgaacggccacgagttcgagatcgagggcgagggcgagggccgcccctacgagggcacccagaccgccaagctgaaggtgaccaagggcggccccctgcccttcgcctgggacatcctgtcccctcagttcatgtacggctccaaggcctacgtgaagcaccccgccgacatccccgactacttgaagctgtccttccccgagggcttcaagtgggagcgcgtgatgaacttcgaggacggcggcgtggtgaccgtgacccaggactcctccctgcaggacggcgagttcatctacaaggtgaagctgcgcggcaccaacttcccctccgacggccccgtaatgcagaagaagaccatgggctgggaggcctcctccgagcggatgtaccccgaggacggcgccctgaagggcgagatcaagcagaggctgaagctgaaggacggcggccactacgacgccgaggtcaagaccacctacaaggccaagaagcccgtgcagctgcccggcgcctacaacgtcaacatcaagctggacatcacctcccacaacgaggactacaccatcgtggaacagtacgagcgcgccgagggccgccactccaccggcggcatggacgagctgtacaagtaa

SEQ ID NO: 211096 - DNA, 2277 bp, Artificial Sequence
  Description of Artificial Sequence: Synthetic Construct
atggtgagcaagggcgccgagctgttcaccggcatcgtgcccatcctgatcgagctgaatggcgatgtgaatggccacaagttcagcgtgagcggcgagggcgagggcgatgccacctacggcaagctgaccctgaagttcatctgcaccaccggcaagctgcctgtgccctggcccaccctggtgaccaccctgagctacggcgtgcagtgcttctcacgctaccccgatcacatgaagcagcacgacttcttcaagagcgccatgcctgagggctacatccaggagcgcaccatcttcttcgaggatgacggcaactacaagtcgcgcgccgaggtgaagttcgagggcgataccctggtgaatcgcatcgagctgaccggcaccgatttcaaggaggatggcaacatcctgggcaataagatggagtacaactacaacgcccacaatgtgtacatcatgaccgacaaggccaagaatggcatcaaggtgaacttcaagatccgccacaacatcgaggatggcagcgtgcagctggccgaccactaccagcagaatacccccatcggcgatggccctgtgctgctgcccgataaccactacctgtccacccagagcgccctgtccaaggaccccaacgagaagcgcgatcacatgatctacttcggcttcgtgaccgccgccgccatcacccacggcatggatgagctgtacaagggatcctcccatcactgggggtacggcaaacacaacggacctgagcactggcataaggacttccccattgccaagggagagcgccagtcccctgttgacatcgacactcatacagccaagtatgacccttccctgaagcccctgtctgtttcctatgatcaagcaacttccctgaggatcctcaacaatggtcatgctttcaacgtggagtttcttgactctcaggacaaagcagtgctcaagggaggacccctggatggcacttacagattgattcagtttcactttcactggggttcacttgatggacaaggttcagagcatactgtggataaaaagaaatatgctgcagaacttcacttggttcactggaacaccaaatatggggattttgggaaagctgtgcagcaacctgatggactggccgttctaggtatttttttgaaggttggcagcgctaaaccgggccttcagaaagttgttgatgtgctggattccattaaaacaaagggcaagagtgctgacttcactaacttcgatcctcgtggcctccttcctgaatccctggattactggacctacccaggctcactgaccacccctcctcttctggaatgtgtgacctggattgtgctcaaggaacccatcagcgtcagcagcgagcaggtgttgaaattccgtaaacttaacttcaatggggagggtgaacccgaagaactgatggtggacaactggcgcccagctcagccacggaagaacaggcaaatcaaagcttccttcaaaagtctagatggagctactaacttcagcctgctgaagcaggctggagacgtggaggagaaccctggacctttgagcaagggcgaggaggacaacatggccatcatcaaggagttcatgcgcttcaaggtgcacatggagggctccgtgaacggccacgagttcgagatcgagggcgagggcgagggccgcccctacgagggcacccagaccgccaagctgaaggtgaccaagggcggccccctgcccttcgcctgggacatcctgtcccctcagttcatgtacggctccaaggcctacgtgaagcaccccgccgacatccccgactacttgaagctgtccttccccgagggcttcaagtgggagcgcgtgatgaacttcgaggacggcggcgtggtgaccgtgacccaggactcctccctgcaggacggcgagttcatctacaaggtgaagctgcgcggcaccaacttcccctccgacggccccgtaatgcagaagaagaccatgggctgggaggcctcctccgagcggatgtaccccgaggacggcgccctgaagggcgagatcaagcagaggctgaagctgaaggacggcggccactacgacgccgaggtcaagaccacctacaaggccaagaagcccgtgcagctgcccggcgcctacaacgtcaacatcaagctggacatcacctcccacaacgaggactacaccatcgtggaacagtacgagcgcgccgagggccgccactccaccggcggcatggacgagctgtacaagtaa

SEQ ID NO: 211097 - DNA, 2277 bp, Artificial Sequence
  Description of Artificial Sequence: Synthetic Construct
atggtgagcaagggcgccgagctgttcaccggcatcgtgcccatcctgatcgagctgaatggcgatgtgaatggccacaagttcagcgtgagcggcgagggcgagggcgatgccacctacggcaagctgaccctgaagttcatctgcaccaccggcaagctgcctgtgccctggcccaccctggtgaccaccctgagctacggcgtgcagtgcttctcacgctaccccgatcacatgaagcagcacgacttcttcaagagcgccatgcctgagggctacatccaggagcgcaccatcttcttcgaggatgacggcaactacaagtcgcgcgccgaggtgaagttcgagggcgataccctggtgaatcgcatcgagctgaccggcaccgatttcaaggaggatggcaacatcctgggcaataagatggagtacaactacaacgcccacaatgtgtacatcatgaccgacaaggccaagaatggcatcaaggtgaacttcaagatccgccacaacatcgaggatggcagcgtgcagctggccgaccactaccagcagaatacccccatcggcgatggccctgtgctgctgcccgataaccactacctgtccacccagagcgccctgtccaaggaccccaacgagaagcgcgatcacatgatctacttcggcttcgtgaccgccgccgccatcacccacggcatggatgagctgtacaagggatcctcccatcactgggggtacggcaaacacaacggacctgagcactggcataaggacttccccattgccaagggagagcgccagtcccctgttgacatcgacactcatacagccaagtatgacccttccctgaagcccctgtctgtttccactgatcaagcaacttccctgaggatcctcaacaatggtcatgctttcaacgtggagtttgatgactctcaggacaaagcagtgctcaagggaggacccctggatggcacttacagattgattcagtttcactttcactggggttcacttgatggacaaggttcagagcatactgtggataaaaagaaatatgctgcagaacttcacttggttcactggaacaccaaatatggggattttgggaaagctgtgcagcaacctgatggactggccgttctaggtatttttttgaaggttggcagcgctaaaccgggccttcagaaagttgttgatgtgctggattccattaaaacaaagggcaagagtgctgacttcactaacttcgatcctcgtggcctccttcctgaatccctggattactggacctacccaggctcactgaccacccctcctcttctggaatgtgtgacctggattgtgctcaaggaacccatcagcgtcagcagcgagcaggtgttgaaattccgtaaacttaacttcaatggggagggtgaacccgaagaactgatggtggacaactggcgcccagctcagccactgaagaacaggcaaatcaaagcttccttcaaaagtctagatggagctactaacttcagcctgctgaagcaggctggagacgtggaggagaaccctggacctttgagcaagggcgaggaggacaacatggccatcatcaaggagttcatgcgcttcaaggtgcacatggagggctccgtgaacggccacgagttcgagatcgagggcgagggcgagggccgcccctacgagggcacccagaccgccaagctgaaggtgaccaagggcggccccctgcccttcgcctgggacatcctgtcccctcagttcatgtacggctccaaggcctacgtgaagcaccccgccgacatccccgactacttgaagctgtccttccccgagggcttcaagtgggagcgcgtgatgaacttcgaggacggcggcgtggtgaccgtgacccaggactcctccctgcaggacggcgagttcatctacaaggtgaagctgcgcggcaccaacttcccctccgacggccccgtaatgcagaagaagaccatgggctgggaggcctcctccgagcggatgtaccccgaggacggcgccctgaagggcgagatcaagcagaggctgaagctgaaggacggcggccactacgacgccgaggtcaagaccacctacaaggccaagaagcccgtgcagctgcccggcgcctacaacgtcaacatcaagctggacatcacctcccacaacgaggactacaccatcgtggaacagtacgagcgcgccgagggccgccactccaccggcggcatggacgagctgtacaagtaa

SEQ ID NO: 211098 - DNA, 2277 bp, Artificial Sequence
  Description of Artificial Sequence: Synthetic Construct
atggtgagcaagggcgccgagctgttcaccggcatcgtgcccatcctgatcgagctgaatggcgatgtgaatggccacaagttcagcgtgagcggcgagggcgagggcgatgccacctacggcaagctgaccctgaagttcatctgcaccaccggcaagctgcctgtgccctggcccaccctggtgaccaccctgagctacggcgtgcagtgcttctcacgctaccccgatcacatgaagcagcacgacttcttcaagagcgccatgcctgagggctacatccaggagcgcaccatcttcttcgaggatgacggcaactacaagtcgcgcgccgaggtgaagttcgagggcgataccctggtgaatcgcatcgagctgaccggcaccgatttcaaggaggatggcaacatcctgggcaataagatggagtacaactacaacgcccacaatgtgtacatcatgaccgacaaggccaagaatggcatcaaggtgaacttcaagatccgccacaacatcgaggatggcagcgtgcagctggccgaccactaccagcagaatacccccatcggcgatggccctgtgctgctgcccgataaccactacctgtccacccagagcgccctgtccaaggaccccaacgagaagcgcgatcacatgatctacttcggcttcgtgaccgccgccgccatcacccacggcatggatgagctgtacaagggatcctcccatcactgggggtacggcaaacacaacggacctgagcactggcataaggacttccccattgccaagggagagcgccagtcccctgttgacatcgacactcatacagccaagtatgacccttccctgaagcccctgtctgtttcctatgatcaagcaacttccctgaggatcctcaacaatggtcatgctttcaacgtggagtttgatgacaatcaggacaaagcagtgctcaagggaggacccctggatggcacttactttttgattcagtttcactttcactggggttcacttgatggacaaggttcagagcatactgtggataaaaagaaatatgctgcagaacttcacttggttcactggaacaccaaatatggggattttgggaaagctgtgcagcaacctgatggactggccgttctaggtatttttttgaaggttggcagcgctaaaccgggccttcagaaagttgttgatgtgctggattccattaaaacaaagggcaagagtgctgacttcactaacttcgatcctcgtggcctccttcctgaatccctggattactggacctacccaggctcactgaccacccctcctcttctggaatgtgtgacctggattgtgctcaaggaacccatcagcgtcagcagcgagcaggtgttgaaattccgtaaacttaacttcaatggggagggtgaacccgaagaactgatggtggacaactggcgcccagctcagccactgaagaacaggcaaatcaaagcttccttcaaaagtctagatggagctactaacttcagcctgctgaagcaggctggagacgtggaggagaaccctggacctttgagcaagggcgaggaggacaacatggccatcatcaaggagttcatgcgcttcaaggtgcacatggagggctccgtgaacggccacgagttcgagatcgagggcgagggcgagggccgcccctacgagggcacccagaccgccaagctgaaggtgaccaagggcggccccctgcccttcgcctgggacatcctgtcccctcagttcatgtacggctccaaggcctacgtgaagcaccccgccgacatccccgactacttgaagctgtccttccccgagggcttcaagtgggagcgcgtgatgaacttcgaggacggcggcgtggtgaccgtgacccaggactcctccctgcaggacggcgagttcatctacaaggtgaagctgcgcggcaccaacttcccctccgacggccccgtaatgcagaagaagaccatgggctgggaggcctcctccgagcggatgtaccccgaggacggcgccctgaagggcgagatcaagcagaggctgaagctgaaggacggcggccactacgacgccgaggtcaagaccacctacaaggccaagaagcccgtgcagctgcccggcgcctacaacgtcaacatcaagctggacatcacctcccacaacgaggactacaccatcgtggaacagtacgagcgcgccgagggccgccactccaccggcggcatggacgagctgtacaagtaa

SEQ ID NO: 211099 - DNA, 2277 bp, Artificial Sequence
  Description of Artificial Sequence: Synthetic Construct
atggtgagcaagggcgccgagctgttcaccggcatcgtgcccatcctgatcgagctgaatggcgatgtgaatggccacaagttcagcgtgagcggcgagggcgagggcgatgccacctacggcaagctgaccctgaagttcatctgcaccaccggcaagctgcctgtgccctggcccaccctggtgaccaccctgagctacggcgtgcagtgcttctcacgctaccccgatcacatgaagcagcacgacttcttcaagagcgccatgcctgagggctacatccaggagcgcaccatcttcttcgaggatgacggcaactacaagtcgcgcgccgaggtgaagttcgagggcgataccctggtgaatcgcatcgagctgaccggcaccgatttcaaggaggatggcaacatcctgggcaataagatggagtacaactacaacgcccacaatgtgtacatcatgaccgacaaggccaagaatggcatcaaggtgaacttcaagatccgccacaacatcgaggatggcagcgtgcagctggccgaccactaccagcagaatacccccatcggcgatggccctgtgctgctgcccgataaccactacctgtccacccagagcgccctgtccaaggaccccaacgagaagcgcgatcacatgatctacttcggcttcgtgaccgccgccgccatcacccacggcatggatgagctgtacaagggatcctcccatcactgggggtacggcaaacacaacggacctgagcactggcataaggacttccccattgccaagggagagcgccagtcccctgttgacatcgacactcatacagccaagtatgacccttccctgaagcccctgtctgtttcctatgatcaagcaacttccctgaggatcctcaacaatggacatgctttcaacgtggagtttgatttttctcaggacaaagcagtgctcaagggaggacccctggatggcacttacagattgattcagtttcactttcactggggttcacttgatggacaaggttcagagcatactgtggataaaaagaaatatgctgcagaacttcacttggttcactggaacaccaaatatggggattttgggaaagctgtgcagcaacctgatggactggccgttctaggtatttttttgaaggttggcagcgctaaaccgggccttcagaaagttgttgatgtgctggattccattaaaacaaagggcaagagtgctgacttcactaacttcgatcctcgtggcctccttcctgaatccctggattactggacctacccaggctcactgaccacccctcctcttctggaatgtgtgacctggattgtgctcaaggaacccatcagcgtcagcagcgagcaggtgttgaaattccgtaaacttaacttcaatggggagggtgaacccgaagaactgatggtggacaactggcgcccagctcagtttctgaagaacaggcaaatcaaagcttccttcaaaagtctagatggagctactaacttcagcctgctgaagcaggctggagacgtggaggagaaccctggacctttgagcaagggcgaggaggacaacatggccatcatcaaggagttcatgcgcttcaaggtgcacatggagggctccgtgaacggccacgagttcgagatcgagggcgagggcgagggccgcccctacgagggcacccagaccgccaagctgaaggtgaccaagggcggccccctgcccttcgcctgggacatcctgtcccctcagttcatgtacggctccaaggcctacgtgaagcaccccgccgacatccccgactacttgaagctgtccttccccgagggcttcaagtgggagcgcgtgatgaacttcgaggacggcggcgtggtgaccgtgacccaggactcctccctgcaggacggcgagttcatctacaaggtgaagctgcgcggcaccaacttcccctccgacggccccgtaatgcagaagaagaccatgggctgggaggcctcctccgagcggatgtaccccgaggacggcgccctgaagggcgagatcaagcagaggctgaagctgaaggacggcggccactacgacgccgaggtcaagaccacctacaaggccaagaagcccgtgcagctgcccggcgcctacaacgtcaacatcaagctggacatcacctcccacaacgaggactacaccatcgtggaacagtacgagcgcgccgagggccgccactccaccggcggcatggacgagctgtacaagtaa

SEQ ID NO: 211100 - DNA, 2277 bp, Artificial Sequence
  Description of Artificial Sequence: Synthetic Construct
atggtgagcaagggcgccgagctgttcaccggcatcgtgcccatcctgatcgagctgaatggcgatgtgaatggccacaagttcagcgtgagcggcgagggcgagggcgatgccacctacggcaagctgaccctgaagttcatctgcaccaccggcaagctgcctgtgccctggcccaccctggtgaccaccctgagctacggcgtgcagtgcttctcacgctaccccgatcacatgaagcagcacgacttcttcaagagcgccatgcctgagggctacatccaggagcgcaccatcttcttcgaggatgacggcaactacaagtcgcgcgccgaggtgaagttcgagggcgataccctggtgaatcgcatcgagctgaccggcaccgatttcaaggaggatggcaacatcctgggcaataagatggagtacaactacaacgcccacaatgtgtacatcatgaccgacaaggccaagaatggcatcaaggtgaacttcaagatccgccacaacatcgaggatggcagcgtgcagctggccgaccactaccagcagaatacccccatcggcgatggccctgtgctgctgcccgataaccactacctgtccacccagagcgccctgtccaaggaccccaacgagaagcgcgatcacatgatctacttcggcttcgtgaccgccgccgccatcacccacggcatggatgagctgtacaagggatcctcccatcactgggggtacggcaaacacaacggacctgagcactggcataaggacttccccattgccaagggagagcgccagtcccctgttgacatcgacactcatacagccaagtatgacccttccctgaagcccctgtctgtttcctatgatcaagcaaagtccctgaggatcctcaacaataatcatgctttcaacgtggagtttgatgactctcaggacaaagcagtgctcaagggaggacccctggatggcacttacagattgattcagtttcactttcactggggttcacttgatggacaaggttcagagcatactgtggataaaaagaaatatgctgcagaacttcacttggttcactggaacaccaaatatggggattttgggaaagctgtgcagcaacctgatggactggccgttctaggtatttttttgaaggttggcagcgctaaaccgggccttcagaaagttgttgatgtgctggattccattaaaacaaagggcaagagtgctgacttcactaacttcgatcctcgtggcctccttcctgaatccctggattactggacctacccaggctcactgaccacccctcctcttctggaatgtgtgacctggattgtgctcaaggaacccatcagcgtcagcagcgagcaggtgttgaaattccgtaaacttaacttcaatggggagggtgaacccgaagaactgatggtggacaactggcgcccagctaatccactgaagaacaggcaaatcaaagcttccttcaaaagtctagatggagctactaacttcagcctgctgaagcaggctggagacgtggaggagaaccctggacctttgagcaagggcgaggaggacaacatggccatcatcaaggagttcatgcgcttcaaggtgcacatggagggctccgtgaacggccacgagttcgagatcgagggcgagggcgagggccgcccctacgagggcacccagaccgccaagctgaaggtgaccaagggcggccccctgcccttcgcctgggacatcctgtcccctcagttcatgtacggctccaaggcctacgtgaagcaccccgccgacatccccgactacttgaagctgtccttccccgagggcttcaagtgggagcgcgtgatgaacttcgaggacggcggcgtggtgaccgtgacccaggactcctccctgcaggacggcgagttcatctacaaggtgaagctgcgcggcaccaacttcccctccgacggccccgtaatgcagaagaagaccatgggctgggaggcctcctccgagcggatgtaccccgaggacggcgccctgaagggcgagatcaagcagaggctgaagctgaaggacggcggccactacgacgccgaggtcaagaccacctacaaggccaagaagcccgtgcagctgcccggcgcctacaacgtcaacatcaagctggacatcacctcccacaacgaggactacaccatcgtggaacagtacgagcgcgccgagggccgccactccaccggcggcatggacgagctgtacaagtaa

SEQ ID NO: 211101 - DNA, 2277 bp, Artificial Sequence
  Description of Artificial Sequence: Synthetic Construct
atggtgagcaagggcgccgagctgttcaccggcatcgtgcccatcctgatcgagctgaatggcgatgtgaatggccacaagttcagcgtgagcggcgagggcgagggcgatgccacctacggcaagctgaccctgaagttcatctgcaccaccggcaagctgcctgtgccctggcccaccctggtgaccaccctgagctacggcgtgcagtgcttctcacgctaccccgatcacatgaagcagcacgacttcttcaagagcgccatgcctgagggctacatccaggagcgcaccatcttcttcgaggatgacggcaactacaagtcgcgcgccgaggtgaagttcgagggcgataccctggtgaatcgcatcgagctgaccggcaccgatttcaaggaggatggcaacatcctgggcaataagatggagtacaactacaacgcccacaatgtgtacatcatgaccgacaaggccaagaatggcatcaaggtgaacttcaagatccgccacaacatcgaggatggcagcgtgcagctggccgaccactaccagcagaatacccccatcggcgatggccctgtgctgctgcccgataaccactacctgtccacccagagcgccctgtccaaggaccccaacgagaagcgcgatcacatgatctacttcggcttcgtgaccgccgccgccatcacccacggcatggatgagctgtacaagggatcctcccatcactgggggtacggcaaacacaacggacctgagcactggcataaggacttccccattgccaagggagagcgccagtcccctgttgacatcgacactcatacagccaagtatgacccttccctgaagcccctgtctgtttcctatgatcaagcaacttccctgaggatcctcaacaatggtcatgctttcaacgtggagtttgatgactctcaggacaaagcagtgctcaagggaggacccctggatggcacttacagattgattcagtttcactttcactggggttcacttgatggacaaggttcagagcatactgtggataaaaagaaatatgctgcagaacttcacttggttcactggaacaccaaatatggggattttgggaaagctgtgcagcaacctgatggactggccgttctaggtatttttttgaaggttggcagcgctaaaccgggccttcagaaagttgttgatgtgctggattccattaaaacaaagggcaagagtgctgacttcactaacttcgatcctcgtggcctccttcctgaatccctggattactggaccattccaggctcactgaccacccctcctcttctggaatgtgtgacctggattgtgctcaaggaacccatcagcgtcagcagcgagcaggtgttgaaattccgtaaacttaacttcaatggggagggtgaacccgaagaactgatggtggacaactggcgcccagctcagccactgaagaacaggcaaatcaaagcttccttcaaaagtctagatggagctactaacttcagcctgctgaagcaggctggagacgtggaggagaaccctggacctttgagcaagggcgaggaggacaacatggccatcatcaaggagttcatgcgcttcaaggtgcacatggagggctccgtgaacggccacgagttcgagatcgagggcgagggcgagggccgcccctacgagggcacccagaccgccaagctgaaggtgaccaagggcggccccctgcccttcgcctgggacatcctgtcccctcagttcatgtacggctccaaggcctacgtgaagcaccccgccgacatccccgactacttgaagctgtccttccccgagggcttcaagtgggagcgcgtgatgaacttcgaggacggcggcgtggtgaccgtgacccaggactcctccctgcaggacggcgagttcatctacaaggtgaagctgcgcggcaccaacttcccctccgacggccccgtaatgcagaagaagaccatgggctgggaggcctcctccgagcggatgtaccccgaggacggcgccctgaagggcgagatcaagcagaggctgaagctgaaggacggcggccactacgacgccgaggtcaagaccacctacaaggccaagaagcccgtgcagctgcccggcgcctacaacgtcaacatcaagctggacatcacctcccacaacgaggactacaccatcgtggaacagtacgagcgcgccgagggccgccactccaccggcggcatggacgagctgtacaagtaa

SEQ ID NO: 211102 - DNA, 2277 bp, Artificial Sequence
  Description of Artificial Sequence: Synthetic Construct
atggtgagcaagggcgccgagctgttcaccggcatcgtgcccatcctgatcgagctgaatggcgatgtgaatggccacaagttcagcgtgagcggcgagggcgagggcgatgccacctacggcaagctgaccctgaagttcatctgcaccaccggcaagctgcctgtgccctggcccaccctggtgaccaccctgagctacggcgtgcagtgcttctcacgctaccccgatcacatgaagcagcacgacttcttcaagagcgccatgcctgagggctacatccaggagcgcaccatcttcttcgaggatgacggcaactacaagtcgcgcgccgaggtgaagttcgagggcgataccctggtgaatcgcatcgagctgaccggcaccgatttcaaggaggatggcaacatcctgggcaataagatggagtacaactacaacgcccacaatgtgtacatcatgaccgacaaggccaagaatggcatcaaggtgaacttcaagatccgccacaacatcgaggatggcagcgtgcagctggccgaccactaccagcagaatacccccatcggcgatggccctgtgctgctgcccgataaccactacctgtccacccagagcgccctgtccaaggaccccaacgagaagcgcgatcacatgatctacttcggcttcgtgaccgccgccgccatcacccacggcatggatgagctgtacaagggatcctcccatcactgggggtacggcaaacacaacggacctgagcactggcataaggacttccccattgccaagggagagcgccagtcccctgttgacatcgacactcatacagccaagtatgacccttccctgaagcccctgtctgtttcctatgatcaagcaacttttctaaggatcctcaacaatggtcatgctttcaacgtggagtttgatgactctcaggacaaagcagtgctcaagggaggacccctggatggcacttacagattgattcagtttcactttcactggggttcacttgatggacaaggttcagagcatactgtggataaaaagaaatatgctgcagaacttcacttggttcactggaacaccaaatatggggattttgggaaagctgtgcagcaacctgatggactggccgttctaggtatttttttgaaggttggcagcgctaaaccgggccttcagaaagttgttgatgtgctggattccattaaaacaaagggcaagagtgctgacttcactaacttcgatcctcgtggcctccttcctgaatccctggattactggacctacccaggctcactgaccacccctcctcttctggaatgtgtgacctggattgtgctcaaggaacccatcagcgtcagcagcgagcaggtgttgaaattccgtaaacttaacttcaatggggagggtgaacccgaagaactgatggtggacaactggcgcccagctcagccactgaagaacaggcaaatcaaagcttccttcaaaagtctagatggagctactaacttcagcctgctgaagcaggctggagacgtggaggagaaccctggacctttgagcaagggcgaggaggacaacatggccatcatcaaggagttcatgcgcttcaaggtgcacatggagggctccgtgaacggccacgagttcgagatcgagggcgagggcgagggccgcccctacgagggcacccagaccgccaagctgaaggtgaccaagggcggccccctgcccttcgcctgggacatcctgtcccctcagttcatgtacggctccaaggcctacgtgaagcaccccgccgacatccccgactacttgaagctgtccttccccgagggcttcaagtgggagcgcgtgatgaacttcgaggacggcggcgtggtgaccgtgacccaggactcctccctgcaggacggcgagttcatctacaaggtgaagctgcgcggcaccaacttcccctccgacggccccgtaatgcagaagaagaccatgggctgggaggcctcctccgagcggatgtaccccgaggacggcgccctgaagggcgagatcaagcagaggctgaagctgaaggacggcggccactacgacgccgaggtcaagaccacctacaaggccaagaagcccgtgcagctgcccggcgcctacaacgtcaacatcaagctggacatcacctcccacaacgaggactacaccatcgtggaacagtacgagcgcgccgagggccgccactccaccggcggcatggacgagctgtacaagtaa

SEQ ID NO: 211103 - DNA, 2277 bp, Artificial Sequence
  Description of Artificial Sequence: Synthetic Construct
atggtgagcaagggcgccgagctgttcaccggcatcgtgcccatcctgatcgagctgaatggcgatgtgaatggccacaagttcagcgtgagcggcgagggcgagggcgatgccacctacggcaagctgaccctgaagttcatctgcaccaccggcaagctgcctgtgccctggcccaccctggtgaccaccctgagctacggcgtgcagtgcttctcacgctaccccgatcacatgaagcagcacgacttcttcaagagcgccatgcctgagggctacatccaggagcgcaccatcttcttcgaggatgacggcaactacaagtcgcgcgccgaggtgaagttcgagggcgataccctggtgaatcgcatcgagctgaccggcaccgatttcaaggaggatggcaacatcctgggcaataagatggagtacaactacaacgcccacaatgtgtacatcatgaccgacaaggccaagaatggcatcaaggtgaacttcaagatccgccacaacatcgaggatggcagcgtgcagctggccgaccactaccagcagaatacccccatcggcgatggccctgtgctgctgcccgataaccactacctgtccacccagagcgccctgtccaaggaccccaacgagaagcgcgatcacatgatctacttcggcttcgtgaccgccgccgccatcacccacggcatggatgagctgtacaagggatcctcccatcactgggggtacggcaaacacaacggacctgagcactggcataaggacttccccattgccaagggagagcgccagtcccctgttgacatcgacactcatacagccaagtatgacccttccctgaagcccctgtctgtttcctatgatcaagcaacttttctgaggatcctcaacaatggtcatgctttcaacgtggagtttagtgactctcaggacaaagcagtgctcaagggaggacccctggatggcacttacagattgattcagtttcactttcactggggttcacttgatggacaaggttcagagcatactgtggataaaaagaaatatgctgcagaacttcacttggttcactggaacaccaaatatggggattttgggaaagctgtgcagcaacctgatggactggccgttctaggtatttttttgaaggttggcagcgctaaaccgggccttcagaaagttgttgatgtgctggattccattaaaacaaagggcaagagtgctgacttcactaacttcgatcctcgtggcctccttcctgaatccctggattactggacctacccaggctcactgaccacccctcctcttctggaatgtgtgacctggattgtgctcaaggaacccatcagcgtcagcagcgagcaggtgttgaaattccgtaaacttaacttcaatggggagggtgaacccgaagaactgatggtggacaactggcgcccagctcagccactgaagaacaggcaaatcaaagcttccttcaaaagtctagatggagctactaacttcagcctgctgaagcaggctggagacgtggaggagaaccctggacctttgagcaagggcgaggaggacaacatggccatcatcaaggagttcatgcgcttcaaggtgcacatggagggctccgtgaacggccacgagttcgagatcgagggcgagggcgagggccgcccctacgagggcacccagaccgccaagctgaaggtgaccaagggcggccccctgcccttcgcctgggacatcctgtcccctcagttcatgtacggctccaaggcctacgtgaagcaccccgccgacatccccgactacttgaagctgtccttccccgagggcttcaagtgggagcgcgtgatgaacttcgaggacggcggcgtggtgaccgtgacccaggactcctccctgcaggacggcgagttcatctacaaggtgaagctgcgcggcaccaacttcccctccgacggccccgtaatgcagaagaagaccatgggctgggaggcctcctccgagcggatgtaccccgaggacggcgccctgaagggcgagatcaagcagaggctgaagctgaaggacggcggccactacgacgccgaggtcaagaccacctacaaggccaagaagcccgtgcagctgcccggcgcctacaacgtcaacatcaagctggacatcacctcccacaacgaggactacaccatcgtggaacagtacgagcgcgccgagggccgccactccaccggcggcatggacgagctgtacaagtaa

SEQ ID NO: 211104 - DNA, 2277 bp, Artificial Sequence
  Description of Artificial Sequence: Synthetic Construct
atggtgagcaagggcgccgagctgttcaccggcatcgtgcccatcctgatcgagctgaatggcgatgtgaatggccacaagttcagcgtgagcggcgagggcgagggcgatgccacctacggcaagctgaccctgaagttcatctgcaccaccggcaagctgcctgtgccctggcccaccctggtgaccaccctgagctacggcgtgcagtgcttctcacgctaccccgatcacatgaagcagcacgacttcttcaagagcgccatgcctgagggctacatccaggagcgcaccatcttcttcgaggatgacggcaactacaagtcgcgcgccgaggtgaagttcgagggcgataccctggtgaatcgcatcgagctgaccggcaccgatttcaaggaggatggcaacatcctgggcaataagatggagtacaactacaacgcccacaatgtgtacatcatgaccgacaaggccaagaatggcatcaaggtgaacttcaagatccgccacaacatcgaggatggcagcgtgcagctggccgaccactaccagcagaatacccccatcggcgatggccctgtgctgctgcccgataaccactacctgtccacccagagcgccctgtccaaggaccccaacgagaagcgcgatcacatgatctacttcggcttcgtgaccgccgccgccatcacccacggcatggatgagctgtacaagggatcctcccatcactgggggtacggcaaacacaacggacctgagcactggcataaggacttccccattgccaagggagagcgccagtcccctgttgacatcgacactcatacagccaagtatgacccttccctgaagcccctgtctgtttcctatgatcaagcaacttccctgaggatcctcaacaatggtcatgctttcaacgtggagtttgatgacaatcaggacaaagcagtgctcaagggaggacccctggatggcacttactatttgattcagtttcactttcactggggttcacttgatggacaaggttcagagcatactgtggataaaaagaaatatgctgcagaacttcacttggttcactggaacaccaaatatggggattttgggaaagctgtgcagcaacctgatggactggccgttctaggtatttttttgaaggttggcagcgctaaaccgggccttcagaaagttgttgatgtgctggattccattaaaacaaagggcaagagtgctgacttcactaacttcgatcctcgtggcctccttcctgaatccctggattactggacctacccaggctcactgaccacccctcctcttctggaatgtgtgacctggattgtgctcaaggaacccatcagcgtcagcagcgagcaggtgttgaaattccgtaaacttaacttcaatggggagggtgaacccgaagaactgatggtggacaactggcgcccagctcagccactgaagaacaggcaaatcaaagcttccttcaaaagtctagatggagctactaacttcagcctgctgaagcaggctggagacgtggaggagaaccctggacctttgagcaagggcgaggaggacaacatggccatcatcaaggagttcatgcgcttcaaggtgcacatggagggctccgtgaacggccacgagttcgagatcgagggcgagggcgagggccgcccctacgagggcacccagaccgccaagctgaaggtgaccaagggcggccccctgcccttcgcctgggacatcctgtcccctcagttcatgtacggctccaaggcctacgtgaagcaccccgccgacatccccgactacttgaagctgtccttccccgagggcttcaagtgggagcgcgtgatgaacttcgaggacggcggcgtggtgaccgtgacccaggactcctccctgcaggacggcgagttcatctacaaggtgaagctgcgcggcaccaacttcccctccgacggccccgtaatgcagaagaagaccatgggctgggaggcctcctccgagcggatgtaccccgaggacggcgccctgaagggcgagatcaagcagaggctgaagctgaaggacggcggccactacgacgccgaggtcaagaccacctacaaggccaagaagcccgtgcagctgcccggcgcctacaacgtcaacatcaagctggacatcacctcccacaacgaggactacaccatcgtggaacagtacgagcgcgccgagggccgccactccaccggcggcatggacgagctgtacaagtaa

SEQ ID NO: 211105 - DNA, 2277 bp, Artificial Sequence
  Description of Artificial Sequence: Synthetic Construct
atggtgagcaagggcgccgagctgttcaccggcatcgtgcccatcctgatcgagctgaatggcgatgtgaatggccacaagttcagcgtgagcggcgagggcgagggcgatgccacctacggcaagctgaccctgaagttcatctgcaccaccggcaagctgcctgtgccctggcccaccctggtgaccaccctgagctacggcgtgcagtgcttctcacgctaccccgatcacatgaagcagcacgacttcttcaagagcgccatgcctgagggctacatccaggagcgcaccatcttcttcgaggatgacggcaactacaagtcgcgcgccgaggtgaagttcgagggcgataccctggtgaatcgcatcgagctgaccggcaccgatttcaaggaggatggcaacatcctgggcaataagatggagtacaactacaacgcccacaatgtgtacatcatgaccgacaaggccaagaatggcatcaaggtgaacttcaagatccgccacaacatcgaggatggcagcgtgcagctggccgaccactaccagcagaatacccccatcggcgatggccctgtgctgctgcccgataaccactacctgtccacccagagcgccctgtccaaggaccccaacgagaagcgcgatcacatgatctacttcggcttcgtgaccgccgccgccatcacccacggcatggatgagctgtacaagggatcctcccatcactgggggtacggcaaacacaacggacctgagcactggcataaggacttccccattgccaagggagagcgccagtcccctgttgacatcgacactcatacagccaagtatgacccttccctgaagcccctgtctgtttcctatgatcaagcaacttccctgaggatcctcaacaatggtcatgctttcaacgtggagtttgatgactctcaggacaaagcagtgctcaagggaggacccctggatggcacttacagattgattcagtttcactttcactggggttcacttgatggacaaggttcagagcatactgtggataaaaagaaatatgctgcagaacttcacttggttcactggaacaccaaatatggggattttgggaaagcttttcagcaacctgatggactggccgttctaggtatttttttgaaggttggcagcgctaaaccgggccttcagaaagttgttgatgtgctggattccattaaaacaaagggcaagagtgctgacttcactaacttcgatcctcgtggcctccttcctgaatccctggattactggacctacccaggctcactgaccacccctcctcttctggaatgtgtgacctggattgtgctcaaggaacccatcagcgtcagcagcgagcaggtgttgaaattccgtaaatttaacttcaatggggagggtgaacccgaagaactgatggtggacaactggcgcccagctcagccactgaagaacaggcaaatcaaagcttccttcaaaagtctagatggagctactaacttcagcctgctgaagcaggctggagacgtggaggagaaccctggacctttgagcaagggcgaggaggacaacatggccatcatcaaggagttcatgcgcttcaaggtgcacatggagggctccgtgaacggccacgagttcgagatcgagggcgagggcgagggccgcccctacgagggcacccagaccgccaagctgaaggtgaccaagggcggccccctgcccttcgcctgggacatcctgtcccctcagttcatgtacggctccaaggcctacgtgaagcaccccgccgacatccccgactacttgaagctgtccttccccgagggcttcaagtgggagcgcgtgatgaacttcgaggacggcggcgtggtgaccgtgacccaggactcctccctgcaggacggcgagttcatctacaaggtgaagctgcgcggcaccaacttcccctccgacggccccgtaatgcagaagaagaccatgggctgggaggcctcctccgagcggatgtaccccgaggacggcgccctgaagggcgagatcaagcagaggctgaagctgaaggacggcggccactacgacgccgaggtcaagaccacctacaaggccaagaagcccgtgcagctgcccggcgcctacaacgtcaacatcaagctggacatcacctcccacaacgaggactacaccatcgtggaacagtacgagcgcgccgagggccgccactccaccggcggcatggacgagctgtacaagtaa

SEQ ID NO: 211106 - DNA, 2265 bp, Artificial Sequence
  Description of Artificial Sequence: Synthetic Construct
atggtgagcaagggcgccgagctgttcaccggcatcgtgcccatcctgatcgagctgaatggcgatgtgaatggccacaagttcagcgtgagcggcgagggcgagggcgatgccacctacggcaagctgaccctgaagttcatctgcaccaccggcaagctgcctgtgccctggcccaccctggtgaccaccctgagctacggcgtgcagtgcttctcacgctaccccgatcacatgaagcagcacgacttcttcaagagcgccatgcctgagggctacatccaggagcgcaccatcttcttcgaggatgacggcaactacaagtcgcgcgccgaggtgaagttcgagggcgataccctggtgaatcgcatcgagctgaccggcaccgatttcaaggaggatggcaacatcctgggcaataagatggagtacaactacaacgcccacaatgtgtacatcatgaccgacaaggccaagaatggcatcaaggtgaacttcaagatccgccacaacatcgaggatggcagcgtgcagctggccgaccactaccagcagaatacccccatcggcgatggccctgtgctgctgcccgataaccactacctgtccacccagagcgccctgtccaaggaccccaacgagaagcgcgatcacatgatctacttcggcttcgtgaccgccgccgccatcacccacggcatggatgagctgtacaagggatcctcccatcactgggggtacggcaaacacaacggacctgagcactggcataaggacttccccattgccaagggagagcgccagtcccctgttgacatcgacactcatacagccaagtatgacccttccctgaagcccctgtctgtttcctatgatcaagcaacttccctgaggatcctcaacaatggtcatgctttcaacgtggagtttgatgactctcaggacaaagcagtgctcaagggaggacccctggatggcacttacagattgattcagtttcactttcactggggttcacttgatggacaaggttcagagcatactgtggataaaaagaaatatgctgcagaacttcacttggttcactggaacaccaaatatggggattttgggaaagctgtgcagcaacctgatggactggccgttctaggtatttttttgaaggttggcagcgctaaaccgggccatcagaaagttgttgatgtgctggattccattaaaacaaagggcaagagtgctgacttcactaacttcgatcctcgtggcctccttcctgaatccctggattactggacctacccaggctcactgaccacccctcctcttctggaatgtgtgacctggattgtgctcaaggaacccatcagcgtcagcagcgagcaggtgttgaaattccgtaaacttaacttcaatggggagggtgaacccgaagaactgatggtggacaactggcgcccagctcagccactgaagaacaggcaaatcaaaagtctagatggagctactaacttcagcctgctgaagcaggctggagacgtggaggagaaccctggacctttgagcaagggcgaggaggacaacatggccatcatcaaggagttcatgcgcttcaaggtgcacatggagggctccgtgaacggccacgagttcgagatcgagggcgagggcgagggccgcccctacgagggcacccagaccgccaagctgaaggtgaccaagggcggccccctgcccttcgcctgggacatcctgtcccctcagttcatgtacggctccaaggcctacgtgaagcaccccgccgacatccccgactacttgaagctgtccttccccgagggcttcaagtgggagcgcgtgatgaacttcgaggacggcggcgtggtgaccgtgacccaggactcctccctgcaggacggcgagttcatctacaaggtgaagctgcgcggcaccaacttcccctccgacggccccgtaatgcagaagaagaccatgggctgggaggcctcctccgagcggatgtaccccgaggacggcgccctgaagggcgagatcaagcagaggctgaagctgaaggacggcggccactacgacgccgaggtcaagaccacctacaaggccaagaagcccgtgcagctgcccggcgcctacaacgtcaacatcaagctggacatcacctcccacaacgaggactacaccatcgtggaacagtacgagcgcgccgagggccgccactccaccggcggcatggacgagctgtacaagtaa

SEQ ID NO: 211107 - DNA, 2265 bp, Artificial Sequence
  Description of Artificial Sequence: Synthetic Construct
atggtgagcaagggcgccgagctgttcaccggcatcgtgcccatcctgatcgagctgaatggcgatgtgaatggccacaagttcagcgtgagcggcgagggcgagggcgatgccacctacggcaagctgaccctgaagttcatctgcaccaccggcaagctgcctgtgccctggcccaccctggtgaccaccctgagctacggcgtgcagtgcttctcacgctaccccgatcacatgaagcagcacgacttcttcaagagcgccatgcctgagggctacatccaggagcgcaccatcttcttcgaggatgacggcaactacaagtcgcgcgccgaggtgaagttcgagggcgataccctggtgaatcgcatcgagctgaccggcaccgatttcaaggaggatggcaacatcctgggcaataagatggagtacaactacaacgcccacaatgtgtacatcatgaccgacaaggccaagaatggcatcaaggtgaacttcaagatccgccacaacatcgaggatggcagcgtgcagctggccgaccactaccagcagaatacccccatcggcgatggccctgtgctgctgcccgataaccactacctgtccacccagagcgccctgtccaaggaccccaacgagaagcgcgatcacatgatctacttcggcttcgtgaccgccgccgccatcacccacggcatggatgagctgtacaagggatccgggtacggcaaacacaacggacctgagcactggcataaggacttccccattgccaagggagagcgccagtcccctgttgacatcgacactcatacagccaagtatgacccttccctgaagcccctgtctgtttcctatgatcaagcaacttccctgaggatcctcaacaatggtcatgctttcaacgtggagtttgatgactctcaggacaaagcagtgctcaagggaggacccctggatggcacttacagattgattcagtttcactttcactggggttcacttgatggacaaggttcagagcatactgtggataaaaagaaatatgctgcagaacttcacttggttcactggaacaccaaatatggggattttgggaaagctgtgcagcaacctgatggactggccgttctaggtatttttttgaaggttggcagcgctaaaccgggccatcagaaagttgttgatgtgctggattccattaaaacaaagggcaagagtgctgacttcactaacttcgatcctcgtggcctccttcctgaatccctggattactggacctacccaggctcactgaccacccctcctcttctggaatgtgtgacctggattgtgctcaaggaacccatcagcgtcagcagcgagcaggtgttgaaattccgtaaacttaacttcaatggggagggtgaacccgaagaactgatggtggacaactggcgcccagctcagccactgaagaacaggcaaatcaaagcttccttcaaaagtctagatggagctactaacttcagcctgctgaagcaggctggagacgtggaggagaaccctggacctttgagcaagggcgaggaggacaacatggccatcatcaaggagttcatgcgcttcaaggtgcacatggagggctccgtgaacggccacgagttcgagatcgagggcgagggcgagggccgcccctacgagggcacccagaccgccaagctgaaggtgaccaagggcggccccctgcccttcgcctgggacatcctgtcccctcagttcatgtacggctccaaggcctacgtgaagcaccccgccgacatccccgactacttgaagctgtccttccccgagggcttcaagtgggagcgcgtgatgaacttcgaggacggcggcgtggtgaccgtgacccaggactcctccctgcaggacggcgagttcatctacaaggtgaagctgcgcggcaccaacttcccctccgacggccccgtaatgcagaagaagaccatgggctgggaggcctcctccgagcggatgtaccccgaggacggcgccctgaagggcgagatcaagcagaggctgaagctgaaggacggcggccactacgacgccgaggtcaagaccacctacaaggccaagaagcccgtgcagctgcccggcgcctacaacgtcaacatcaagctggacatcacctcccacaacgaggactacaccatcgtggaacagtacgagcgcgccgagggccgccactccaccggcggcatggacgagctgtacaagtaa

SEQ ID NO: 211108 - DNA, 2277 bp, Artificial Sequence
  Description of Artificial Sequence: Synthetic Construct
atggtgagcaagggcgccgagctgttcaccggcatcgtgcccatcctgatcgagctgaatggcgatgtgaatggccacaagttcagcgtgagcggcgagggcgagggcgatgccacctacggcaagctgaccctgaagttcatctgcaccaccggcaagctgcctgtgccctggcccaccctggtgaccaccctgagctacggcgtgcagtgcttctcacgctaccccgatcacatgaagcagcacgacttcttcaagagcgccatgcctgagggctacatccaggagcgcaccatcttcttcgaggatgacggcaactacaagtcgcgcgccgaggtgaagttcgagggcgataccctggtgaatcgcatcgagctgaccggcaccgatttcaaggaggatggcaacatcctgggcaataagatggagtacaactacaacgcccacaatgtgtacatcatgaccgacaaggccaagaatggcatcaaggtgaacttcaagatccgccacaacatcgaggatggcagcgtgcagctggccgaccactaccagcagaatacccccatcggcgatggccctgtgctgctgcccgataaccactacctgtccacccagagcgccctgtccaaggaccccaacgagaagcgcgatcacatgatctacttcggcttcgtgaccgccgccgccatcacccacggcatggatgagctgtacaagggatcctcccatcactacgggtacggcaaacacaacggacctgagcactggcataaggacttccccattgccaagggagagcgccagtcccctgttgacatcgacactcatacagccaagtatgacccttccctgaagcccctgtctgtttcctatgatcaagcaacttccctgaggatcctcaacaatggtcatgctttcaacgtggagtttgatgactctcaggacaaagcagtgctcaagggaggacccctggatggcacttacagattgattcagtttcactttcactggggttcacttgatggacaaggttcagagcatactgtggataaaaagaaatatgctgcagaacttcacttggttcactggaacaccaaatatggggattttgggaaagctgtgcagcaacctgatggactggccgttctaggtatttttttgaaggttggcagcgctaaaccgggccatcagaaagttgttgatgtgctggattccattaaaacaaagggcaagagtgctgacttcactaacttcgatcctcgtggcctccttcctgaatccctggattactggacctacccaggctcactgaccacccctcctcttctggaatgtgtgacctggattgtgctcaaggaacccatcagcgtcagcagcgagcaggtgttgaaattccgtaaacttaacttcaatggggagggtgaacccgaagaactgatggtggacaactggcgcccagctcagccactgaagaacaggcaaatcaaagcttccttcaaaagtctagatggagctactaacttcagcctgctgaagcaggctggagacgtggaggagaaccctggacctttgagcaagggcgaggaggacaacatggccatcatcaaggagttcatgcgcttcaaggtgcacatggagggctccgtgaacggccacgagttcgagatcgagggcgagggcgagggccgcccctacgagggcacccagaccgccaagctgaaggtgaccaagggcggccccctgcccttcgcctgggacatcctgtcccctcagttcatgtacggctccaaggcctacgtgaagcaccccgccgacatccccgactacttgaagctgtccttccccgagggcttcaagtgggagcgcgtgatgaacttcgaggacggcggcgtggtgaccgtgacccaggactcctccctgcaggacggcgagttcatctacaaggtgaagctgcgcggcaccaacttcccctccgacggccccgtaatgcagaagaagaccatgggctgggaggcctcctccgagcggatgtaccccgaggacggcgccctgaagggcgagatcaagcagaggctgaagctgaaggacggcggccactacgacgccgaggtcaagaccacctacaaggccaagaagcccgtgcagctgcccggcgcctacaacgtcaacatcaagctggacatcacctcccacaacgaggactacaccatcgtggaacagtacgagcgcgccgagggccgccactccaccggcggcatggacgagctgtacaagtaa

SEQ ID NO: 211109 - DNA, 2268 bp, Artificial Sequence
  Description of Artificial Sequence: Synthetic Construct
atggtgagcaagggcgccgagctgttcaccggcatcgtgcccatcctgatcgagctgaatggcgatgtgaatggccacaagttcagcgtgagcggcgagggcgagggcgatgccacctacggcaagctgaccctgaagttcatctgcaccaccggcaagctgcctgtgccctggcccaccctggtgaccaccctgagctacggcgtgcagtgcttctcacgctaccccgatcacatgaagcagcacgacttcttcaagagcgccatgcctgagggctacatccaggagcgcaccatcttcttcgaggatgacggcaactacaagtcgcgcgccgaggtgaagttcgagggcgataccctggtgaatcgcatcgagctgaccggcaccgatttcaaggaggatggcaacatcctgggcaataagatggagtacaactacaacgcccacaatgtgtacatcatgaccgacaaggccaagaatggcatcaaggtgaacttcaagatccgccacaacatcgaggatggcagcgtgcagctggccgaccactaccagcagaatacccccatcggcgatggccctgtgctgctgcccgataaccactacctgtccacccagagcgccctgtccaaggaccccaacgagaagcgcgatcacatgatctacttcggcttcgtgaccgccgccgccatcacccacggcatggatgagctgtacaagggatcctcccatcactgggggtacggcaaacacaacggacctgagcactggcataaggacttccccattgccaagggagagcgccagtcccctgttgacatcgacactcatacagccaagtatgacccttccctgaagcccctgtctgtttcctatgatcaagcaacttccctgaggatcctcaacaatggtcatgctttcaacgtggagtttgatgactctcaggacaaagcagtgctcaagggaggacccctggatggcacttacagattgattcagtttcactttcactggggttcacttgatggacaaggttcagagcatactgtggataaaaagaaatatgctgcagaacttcacttggttcactggaacaccaaatatggggattttgggaaagctgtgcagcaacctgatggactggccgttctaggtatttttttgaaggttggcagcgctaaaccgggccatcagaaagttgttgatgtgctggattccattaaaacaaagggcaagagtgctgacttcactaacttcgatcctcgtggcctccttcctgaatccctggattactggacctacccaggctcactgaccacccctcctcttctggaatgtgtgacctggattgtgctcaaggaacccatcagcgtcagcagcgagcaggtgttgaaattccgtaaacttaacttcaatggggaggaagaactgatggtggacaactggcgcccagctcagccactgaagaacaggcaaatcaaagcttccttcaaaagtctagatggagctactaacttcagcctgctgaagcaggctggagacgtggaggagaaccctggacctttgagcaagggcgaggaggacaacatggccatcatcaaggagttcatgcgcttcaaggtgcacatggagggctccgtgaacggccacgagttcgagatcgagggcgagggcgagggccgcccctacgagggcacccagaccgccaagctgaaggtgaccaagggcggccccctgcccttcgcctgggacatcctgtcccctcagttcatgtacggctccaaggcctacgtgaagcaccccgccgacatccccgactacttgaagctgtccttccccgagggcttcaagtgggagcgcgtgatgaacttcgaggacggcggcgtggtgaccgtgacccaggactcctccctgcaggacggcgagttcatctacaaggtgaagctgcgcggcaccaacttcccctccgacggccccgtaatgcagaagaagaccatgggctgggaggcctcctccgagcggatgtaccccgaggacggcgccctgaagggcgagatcaagcagaggctgaagctgaaggacggcggccactacgacgccgaggtcaagaccacctacaaggccaagaagcccgtgcagctgcccggcgcctacaacgtcaacatcaagctggacatcacctcccacaacgaggactacaccatcgtggaacagtacgagcgcgccgagggccgccactccaccggcggcatggacgagctgtacaagtaa

SEQ ID NO: 211110 - DNA, 2277 bp, Artificial Sequence
  Description of Artificial Sequence: Synthetic Construct
atggtgagcaagggcgccgagctgttcaccggcatcgtgcccatcctgatcgagctgaatggcgatgtgaatggccacaagttcagcgtgagcggcgagggcgagggcgatgccacctacggcaagctgaccctgaagttcatctgcaccaccggcaagctgcctgtgccctggcccaccctggtgaccaccctgagctacggcgtgcagtgcttctcacgctaccccgatcacatgaagcagcacgacttcttcaagagcgccatgcctgagggctacatccaggagcgcaccatcttcttcgaggatgacggcaactacaagtcgcgcgccgaggtgaagttcgagggcgataccctggtgaatcgcatcgagctgaccggcaccgatttcaaggaggatggcaacatcctgggcaataagatggagtacaactacaacgcccacaatgtgtacatcatgaccgacaaggccaagaatggcatcaaggtgaacttcaagatccgccacaacatcgaggatggcagcgtgcagctggccgaccactaccagcagaatacccccatcggcgatggccctgtgctgctgcccgataaccactacctgtccacccagagcgccctgtccaaggaccccaacgagaagcgcgatcacatgatctacttcggcttcgtgaccgccgccgccatcacccacggcatggatgagctgtacaagggatcctcccatcactgggggtacggcaaacacaacggacctgagcactggcataaggacttccccattgccaagggagagcgccagtcccctgttgacatcgacactcatacagccaagtatgacccttccctgaagcccctgtctgtttcctatgatcaagcaacttccctgaggatcctcaacaatggtcatgctttcaacgtggagtttgatgactctcaggacaaagcagtgctcaagggaggacccctggatggcacttacagattgattcagtttcactttcactggggttcacttgatggacaaggttcagagcatactgtggataaaaagaaatatgctgcagaacttcacttggttcactggaacaccaaatatggggattttgggaaagctgtgcagcaacctgatggactggccgttctaggtatttttttgaaggttggcagcgctaaaccgggccatcagaaagttgttgatgtgctggattccattaaaacaaagggcaagagtgctgacttcactaacttcgatcctcgtggcctccttcctgaatccctggattactggacctacccaggctcactgaccacccctcctcttctggaatgtgtgacctggattgtgctcaaggaacccatcagcgtcagcagcgagcaggtgttgaaactccgtaaacttaacttcaatggggagggtgaacccgaagaactgatggtggacaactggcgcccagctcagccactgaagaacaggcaaatcaaagcttccttcaaaagtctagatggagctactaacttcagcctgctgaagcaggctggagacgtggaggagaaccctggacctttgagcaagggcgaggaggacaacatggccatcatcaaggagttcatgcgcttcaaggtgcacatggagggctccgtgaacggccacgagttcgagatcgagggcgagggcgagggccgcccctacgagggcacccagaccgccaagctgaaggtgaccaagggcggccccctgcccttcgcctgggacatcctgtcccctcagttcatgtacggctccaaggcctacgtgaagcaccccgccgacatccccgactacttgaagctgtccttccccgagggcttcaagtgggagcgcgtgatgaacttcgaggacggcggcgtggtgaccgtgacccaggactcctccctgcaggacggcgagttcatctacaaggtgaagctgcgcggcaccaacttcccctccgacggccccgtaatgcagaagaagaccatgggctgggaggcctcctccgagcggatgtaccccgaggacggcgccctgaagggcgagatcaagcagaggctgaagctgaaggacggcggccactacgacgccgaggtcaagaccacctacaaggccaagaagcccgtgcagctgcccggcgcctacaacgtcaacatcaagctggacatcacctcccacaacgaggactacaccatcgtggaacagtacgagcgcgccgagggccgccactccaccggcggcatggacgagctgtacaagtaa

SEQ ID NO: 211111 - DNA, 2277 bp, Artificial Sequence
  Description of Artificial Sequence: Synthetic Construct
atggtgagcaagggcgccgagctgttcaccggcatcgtgcccatcctgatcgagctgaatggcgatgtgaatggccacaagttcagcgtgagcggcgagggcgagggcgatgccacctacggcaagctgaccctgaagttcatctgcaccaccggcaagctgcctgtgccctggcccaccctggtgaccaccctgagctacggcgtgcagtgcttctcacgctaccccgatcacatgaagcagcacgacttcttcaagagcgccatgcctgagggctacatccaggagcgcaccatcttcttcgaggatgacggcaactacaagtcgcgcgccgaggtgaagttcgagggcgataccctggtgaatcgcatcgagctgaccggcaccgatttcaaggaggatggcaacatcctgggcaataagatggagtacaactacaacgcccacaatgtgtacatcatgaccgacaaggccaagaatggcatcaaggtgaacttcaagatccgccacaacatcgaggatggcagcgtgcagctggccgaccactaccagcagaatacccccatcggcgatggccctgtgctgctgcccgataaccactacctgtccacccagagcgccctgtccaaggaccccaacgagaagcgcgatcacatgatctacttcggcttcgtgaccgccgccgccatcacccacggcatggatgagctgtacaagggatcctcccatcactgggggtacggcaaacacaacggacctgagcactggcataaggacttccccattgccaagggagagcgccagtcccctgttgacatcgacactcatacagccaagtatgacccttccctgaagcccctgtctgtttcctatgatcaagcaacttccctgaggatcctcaacaatggtcatgctttcaacgtggagtttaatgactctcagaacaaagcagtgctcaagggaggacccctggatggcacttacagattgattcagtttcactttcactggggttcacttaatggacaaggttcagagcatactgtggataaaaagaaatatgctgcagaacttcacttggttcactggaacaccaaatatggggattttgggaaagctgtgcagcaacctgatggactggccgttctaggtatttttttgaaggttggcagcgctaaaccgggccatcagaaagttgttgatgtgctggattccattaaaacaaagggcaagagtgctgacttcactaacttcgatcctcgtggcctccttcctgaatccctggattactggacctacccaggctcactgaccacccctcctcttctggaatgtgtgacctggattgtgctcaaggaacccatcagcgtcagcagcgagcaggtgttgaaattccgtaaacttaacttcaatggggagggtgaacccgaagaactgatggtggacaactggcgcccagctcagccactgaagaacaggcaaatcaaagcttccttcaaaagtctagatggagctactaacttcagcctgctgaagcaggctggagacgtggaggagaaccctggacctttgagcaagggcgaggaggacaacatggccatcatcaaggagttcatgcgcttcaaggtgcacatggagggctccgtgaacggccacgagttcgagatcgagggcgagggcgagggccgcccctacgagggcacccagaccgccaagctgaaggtgaccaagggcggccccctgcccttcgcctgggacatcctgtcccctcagttcatgtacggctccaaggcctacgtgaagcaccccgccgacatccccgactacttgaagctgtccttccccgagggcttcaagtgggagcgcgtgatgaacttcgaggacggcggcgtggtgaccgtgacccaggactcctccctgcaggacggcgagttcatctacaaggtgaagctgcgcggcaccaacttcccctccgacggccccgtaatgcagaagaagaccatgggctgggaggcctcctccgagcggatgtaccccgaggacggcgccctgaagggcgagatcaagcagaggctgaagctgaaggacggcggccactacgacgccgaggtcaagaccacctacaaggccaagaagcccgtgcagctgcccggcgcctacaacgtcaacatcaagctggacatcacctcccacaacgaggactacaccatcgtggaacagtacgagcgcgccgagggccgccactccaccggcggcatggacgagctgtacaagtaa

SEQ ID NO: 211112 - protein, 747 aa, Artificial Sequence
  Description of Artificial Sequence: Synthetic Construct
MALPVTALLLPLALLLHAARPDIQMTQTTSSLSASLGDRVTISCRASQDISKYLNWYQQKPDGTVKLLIYHTSRLHSGVPSRFSGSGSGTDYSLTISNLEQEDIATYFCQQGNTLPYTFGGGTKLEITGGGGSGGGGSGGGGSEVKLQESGPGLVAPSQSLSVTCTVSGVSLPDYGVSWIRQPPRKGLEWLGVIWGSETTYYNSALKSRLTIIKDNSKSQVFLKMNSLQTDDTAIYYCAKHYYYGGSYAMDYWGQGTSVTVSSTTTPAPRPPTPAPTIASQPLSLRPEACRPAAGGAVHTRGLDFACDIYIWAPLAGTCGVLLLSLVITLYCKRGRKKLLYIFKQPFMRPVQTTQEEDGCSCRFPEEEEGGCELRVKFSRSADAPAYKQGQNQLYNELNLGRREEYDVLDKRRGRDPEMGGKPRRKNPQEGLYNELQKDKMAEAYSEIGMKGERRRGKGHDGLYQGLSTATKDTYDALHMQALPPRGSSHHWGYGKHNGPEHWHKDFPIAKGERQSPVDIDTHTAKYDPSLKPLSVSYDQATSLRILNNDHAFNVVFDDSQDKAVLKGGPLDGTYRLIQFHFHWGSLDGQGSEHTVDKKKYAAELHLVHWNTKYGDFGKAVQQPDGLAVLGIFLKVGSAKPGLQKVVDVLDSIKTKGKSADFTNFDPRGLLPESLDYWTYPGSLTTPPLLECVTWIVLKEPISVSSEQVLKFRKLNFIGEGEPEELMVDNWRPAQPLKNRQIKASFK

SEQ ID NO: 211113 - protein, 747 aa, Artificial Sequence
  Description of Artificial Sequence: Synthetic Construct
MALPVTALLLPLALLLHAARPDIQMTQTTSSLSASLGDRVTISCRASQDISKYLNWYQQKPDGTVKLLIYHTSRLHSGVPSRFSGSGSGTDYSLTISNLEQEDIATYFCQQGNTLPYTFGGGTKLEITGGGGSGGGGSGGGGSEVKLQESGPGLVAPSQSLSVTCTVSGVSLPDYGVSWIRQPPRKGLEWLGVIWGSETTYYNSALKSRLTIIKDNSKSQVFLKMNSLQTDDTAIYYCAKHYYYGGSYAMDYWGQGTSVTVSSTTTPAPRPPTPAPTIASQPLSLRPEACRPAAGGAVHTRGLDFACDIYIWAPLAGTCGVLLLSLVITLYCKRGRKKLLYIFKQPFMRPVQTTQEEDGCSCRFPEEEEGGCELRVKFSRSADAPAYKQGQNQLYNELNLGRREEYDVLDKRRGRDPEMGGKPRRKNPQEGLYNELQKDKMAEAYSEIGMKGERRRGKGHDGLYQGLSTATKDTYDALHMQALPPRGSSHHWGYGKHNGPEHWHKDFPIAKGERQSPVDIDTHTAKYDPSLKPLSVSYDQATSLRILNNGHAFNVEFDDSQDKAVLKGGPLDGTYRLIQFHFHWGSLDGQGSEHTVDKKKYAAELHLVHWNTKYGDFGKAVQQPDGLAVLGIFLKVGSAKPGLQKVVDVLDSIKTKGKSADFTNFDPRGLLPESLDYWTYPGSPTTPPLLECVTWIVLKEPISVSSEQVLKFRKLNFNGEGEPEELMVDNWRPAQPLKNRQIKASFK

SEQ ID NO: 211114 - protein, 747 aa, Artificial Sequence
  Description of Artificial Sequence: Synthetic Construct
MALPVTALLLPLALLLHAARPDIQMTQTTSSLSASLGDRVTISCRASQDISKYLNWYQQKPDGTVKLLIYHTSRLHSGVPSRFSGSGSGTDYSLTISNLEQEDIATYFCQQGNTLPYTFGGGTKLEITGGGGSGGGGSGGGGSEVKLQESGPGLVAPSQSLSVTCTVSGVSLPDYGVSWIRQPPRKGLEWLGVIWGSETTYYNSALKSRLTIIKDNSKSQVFLKMNSLQTDDTAIYYCAKHYYYGGSYAMDYWGQGTSVTVSSTTTPAPRPPTPAPTIASQPLSLRPEACRPAAGGAVHTRGLDFACDIYIWAPLAGTCGVLLLSLVITLYCKRGRKKLLYIFKQPFMRPVQTTQEEDGCSCRFPEEEEGGCELRVKFSRSADAPAYKQGQNQLYNELNLGRREEYDVLDKRRGRDPEMGGKPRRKNPQEGLYNELQKDKMAEAYSEIGMKGERRRGKGHDGLYQGLSTATKDTYDALHMQALPPRGSSHHWGYGKHNGPEHWHKDFPIAKGERQSPVDIDTHTAKYDPSLKPLSVSYDQATSLRILNNGHAFNVEFDDSQDKAVLKGGPLDGTYRLIQFHFHWGSLDGQGSEHTVDKKKYAAELHLVHWNTKYGDFGKAVQQPDGLAVLGIFLKVGSAKPGHQKVVDVLDSIKTKGKCADFTNYDPRGLLPDSLDYWTYPGSLTTPPLLECVTWIVLKEPISVSSEQVLKFRKLNFNGEGEPEELMVDNWRPAQPLKNRQIKASFK

SEQ ID NO: 211115 - protein, 747 aa, Artificial Sequence
  Description of Artificial Sequence: Synthetic Construct
MALPVTALLLPLALLLHAARPDIQMTQTTSSLSASLGDRVTISCRASQDISKYLNWYQQKPDGTVKLLIYHTSRLHSGVPSRFSGSGSGTDYSLTISNLEQEDIATYFCQQGNTLPYTFGGGTKLEITGGGGSGGGGSGGGGSEVKLQESGPGLVAPSQSLSVTCTVSGVSLPDYGVSWIRQPPRKGLEWLGVIWGSETTYYNSALKSRLTIIKDNSKSQVFLKMNSLQTDDTAIYYCAKHYYYGGSYAMDYWGQGTSVTVSSTTTPAPRPPTPAPTIASQPLSLRPEACRPAAGGAVHTRGLDFACDIYIWAPLAGTCGVLLLSLVITLYCKRGRKKLLYIFKQPFMRPVQTTQEEDGCSCRFPEEEEGGCELRVKFSRSADAPAYKQGQNQLYNELNLGRREEYDVLDKRRGRDPEMGGKPRRKNPQEGLYNELQKDKMAEAYSEIGMKGERRRGKGHDGLYQGLSTATKDTYDALHMQALPPRGSSHHWGYGKHNGPEHWHKDFPIAKGELQSPVDIDTHTAKYDPSLKPLSVSYDQATSLRILNNGHAFNVEFDDSQDKAVLKGGPLDGIYRLIQFHFHWGSLDGQGSEHTVDKKKYAAELHLVYWNTKYGDFGKAVQQPDGLAVLGIFLKVGSAKPGLQKVVDVLDSIKTKGKSADFTNFDPRGLLPESLDYWTYPGSLTTPPLLECVTWIVLKEPISVSSEQVLKFRKLNFNGEGEPEELMVDNWRPAQPLKDRQIKASFK

SEQ ID NO: 211116 - protein, 747 aa, Artificial Sequence
  Description of Artificial Sequence: Synthetic Construct
MALPVTALLLPLALLLHAARPDIQMTQTTSSLSASLGDRVTISCRASQDISKYLNWYQQKPDGTVKLLIYHTSRLHSGVPSRFSGSGSGTDYSLTISNLEQEDIATYFCQQGNTLPYTFGGGTKLEITGGGGSGGGGSGGGGSEVKLQESGPGLVAPSQSLSVTCTVSGVSLPDYGVSWIRQPPRKGLEWLGVIWGSETTYYNSALKSRLTIIKDNSKSQVFLKMNSLQTDDTAIYYCAKHYYYGGSYAMDYWGQGTSVTVSSTTTPAPRPPTPAPTIASQPLSLRPEACRPAAGGAVHTRGLDFACDIYIWAPLAGTCGVLLLSLVITLYCKRGRKKLLYIFKQPFMRPVQTTQEEDGCSCRFPEEEEGGCELRVKFSRSADAPAYKQGQNQLYNELNLGRREEYDVLDKRRGRDPEMGGKPRRKNPQEGLYNELQKDKMAEAYSEIGMKGERRRGKGHDGLYQGLSTATKDTYDALHMQALPPRGSSHHWGYGKHNGPEHWHKDFPIAKGERQSPVDIDTHTAKYDPSLKPLSVSYDQATNLRILNNGHAFNVEFDDSQDKAVLKGGPLDGTYRLIQFHFHWGSLDGQGSEHTVDKKKYAAELHLVHWNTKYGDFGKAVQQPDGLAVLGIFLKVGSAKPGLQKVVDVLDSIKTKGKSADFTNFDPRGLLPESLDYWTYPGSLTTPPLLECVTWIVLKEPISVSSEQVLKFRKLNFNGEGEPEELMVDNWRPAQPLKNRQIKASFK

SEQ ID NO: 211117 - protein, 747 aa, Artificial Sequence
  Description of Artificial Sequence: Synthetic Construct
MALPVTALLLPLALLLHAARPDIQMTQTTSSLSASLGDRVTISCRASQDISKYLNWYQQKPDGTVKLLIYHTSRLHSGVPSRFSGSGSGTDYSLTISNLEQEDIATYFCQQGNTLPYTFGGGTKLEITGGGGSGGGGSGGGGSEVKLQESGPGLVAPSQSLSVTCTVSGVSLPDYGVSWIRQPPRKGLEWLGVIWGSETTYYNSALKSRLTIIKDNSKSQVFLKMNSLQTDDTAIYYCAKHYYYGGSYAMDYWGQGTSVTVSSTTTPAPRPPTPAPTIASQPLSLRPEACRPAAGGAVHTRGLDFACDIYIWAPLAGTCGVLLLSLVITLYCKRGRKKLLYIFKQPFMRPVQTTQEEDGCSCRFPEEEEGGCELRVKFSRSADAPAYKQGQNQLYNELNLGRREEYDVLDKRRGRDPEMGGKPRRKNPQEGLYNELQKDKMAEAYSEIGMKGERRRGKGHDGLYQGLSTATKDTYDALHMQALPPRGSSHHWGYGKHNGPEHWHKDFPIAKGERQSPVDIDTHTAKYDPSLKPLSVSYDQATSLRILNNGHAFNVEFDFSQDKAVLKGGPLDGTYRLIQFHFHWGSLDGQGSEHTVDKKKYAAELHLVHWNTKYGDFGKAVQQPDGLAVLGIFLKVGSAKPGLQKVVDVLDSIKTKGKSADFTNFDPRGLLPESLDYWTYPGSLTTPPLLECVTWIVLKEPISVSSEQVLKFRKLNFNGEGEPEELMFDNWRPAQLLKNRQIKASFK

SEQ ID NO: 211118 - protein, 747 aa, Artificial Sequence
  Description of Artificial Sequence: Synthetic Construct
MALPVTALLLPLALLLHAARPDIQMTQTTSSLSASLGDRVTISCRASQDISKYLNWYQQKPDGTVKLLIYHTSRLHSGVPSRFSGSGSGTDYSLTISNLEQEDIATYFCQQGNTLPYTFGGGTKLEITGGGGSGGGGSGGGGSEVKLQESGPGLVAPSQSLSVTCTVSGVSLPDYGVSWIRQPPRKGLEWLGVIWGSETTYYNSALKSRLTIIKDNSKSQVFLKMNSLQTDDTAIYYCAKHYYYGGSYAMDYWGQGTSVTVSSTTTPAPRPPTPAPTIASQPLSLRPEACRPAAGGAVHTRGLDFACDIYIWAPLAGTCGVLLLSLVITLYCKRGRKKLLYIFKQPFMRPVQTTQEEDGCSCRFPEEEEGGCELRVKFSRSADAPAYKQGQNQLYNELNLGRREEYDVLDKRRGRDPEMGGKPRRKNPQEGLYNELQKDKMAEAYSEIGMKGERRRGKGHDGLYQGLSTATKDTYDALHMQALPPRGSSHHWGYGKHNGPEHWHKDFPIAKGERQSPVDIDTHTAKYDPSLKPLSVSYDQATSLRILNNGHAFNVEFLDSQDKAVLKGGPLDGNYRLIQFHFHWGSLDGQGSEHTVDKKKYAAELHLVHWNTKYGDFGKAVQQPDGLAVLGIFLKVGSAKPGLQKVVDVLDSIKTKGKSADFTNFDPRGLLPESLDYWTYPGSLTTPPLLECVTWIVLKEPISVSSEQVLKFRKLNFNGEGEPEELMVDNWRPAQPRKNRQIKASFK

SEQ ID NO: 211119 - protein, 747 aa, Artificial Sequence
  Description of Artificial Sequence: Synthetic Construct
MALPVTALLLPLALLLHAARPDIQMTQTTSSLSASLGDRVTISCRASQDISKYLNWYQQKPDGTVKLLIYHTSRLHSGVPSRFSGSGSGTDYSLTISNLEQEDIATYFCQQGNTLPYTFGGGTKLEITGGGGSGGGGSGGGGSEVKLQESGPGLVAPSQSLSVTCTVSGVSLPDYGVSWIRQPPRKGLEWLGVIWGSETTYYNSALKSRLTIIKDNSKSQVFLKMNSLQTDDTAIYYCAKHYYYGGSYAMDYWGQGTSVTVSSTTTPAPRPPTPAPTIASQPLSLRPEACRPAAGGAVHTRGLDFACDIYIWAPLAGTCGVLLLSLVITLYCKRGRKKLLYIFKQPFMRPVQTTQEEDGCSCRFPEEEEGGCELRVKFSRSADAPAYKQGQNQLYNELNLGRREEYDVLDKRRGRDPEMGGKPRRKNPQEGLYNELQKDKMAEAYSEIGMKGERRRGKGHDGLYQGLSTATKDTYDALHMQALPPRGSSHHWGYGKHNGPEHWHKDFPIAKGERQSPVDIDTHTAKYDPSLKPLSVSYDQATSLRILNNGHAFNVEFDDSQDKAVLKGGPLDGTYRLIQFHFHWGSLDGQGSEHTVDKKKYAAELHLVHWNTKYGDFGKAVQQPDGLAVLGIFLKVGSAKPGLQKVVDVLDSIKTKGKSADFTNFDPRGSLPESLDYWTYPGSLTTPPLLECVTWIVLKEPISVSSEQVLKFRKLNFNGEGEPEELMVDNWRPAQPLKNRQIKASFK

SEQ ID NO: 211120 - DNA, 2244 bp, Artificial Sequence
  Description of Artificial Sequence: Synthetic Construct
atggccttaccagtgaccgccttgctcctgccgctggccttgctgctccacgccgccaggccggacatccagatgacacagactacatcctccctgtctgcctctctgggagacagagtcaccatcagttgcagggcaagtcaggacattagtaaatatttaaattggtatcagcagaaaccagatggaactgttaaactcctgatctaccatacatcaagattacactcaggagtcccatcaaggttcagtggcagtgggtctggaacagattattctctcaccattagcaacctggagcaagaagatattgccacttacttttgccaacagggtaatacgcttccgtacacgttcggaggggggaccaagctggagatcacaggtggcggtggctcgggcggtggtgggtcgggtggcggcggatctgaggtgaaactgcaggagtcaggacctggcctggtggcgccctcacagagcctgtccgtcacatgcactgtctcaggggtctcattacccgactatggtgtaagctggattcgccagcctccacgaaagggtctggagtggctgggagtaatatggggtagtgaaaccacatactataattcagctctcaaatccagactgaccatcatcaaggacaactccaagagccaagttttcttaaaaatgaacagtctgcaaactgatgacacagccatttactactgtgccaaacattattactacggtggtagctatgctatggactactggggccaaggaacctcagtcaccgtctcctcaaccacgacgccagcgccgcgaccaccaacaccggcgcccaccatcgcgtcgcagcccctgtccctgcgcccagaggcgtgccggccagcggcggggggcgcagtgcacacgagggggctggacttcgcctgtgatatctacatctgggcgcccttggccgggacttgtggggtccttctcctgtcactggttatcaccctttactgcaaacggggcagaaagaaactcctgtatatattcaaacaaccatttatgagaccagtacaaactactcaagaggaagatggctgtagctgccgatttccagaagaagaagaaggaggatgtgaactgagagtgaagttcagcaggagcgcagacgcccccgcgtacaagcagggccagaaccagctctataacgagctcaatctaggacgaagagaggagtacgatgttttggacaagagacgtggccgggaccctgagatggggggaaagccgagaaggaagaaccctcaggaaggcctgtacaatgaactgcagaaagataagatggcggaggcctacagtgagattgggatgaaaggcgagcgccggaggggcaaggggcacgatggcctttaccagggtctcagtacagccaccaaggacacctacgacgcccttcacatgcaggccctgccccctcgcggatcctcccatcactgggggtacggcaaacacaacggacctgagcactggcataaggacttccccattgccaagggagagcgccagtcccctgttgacatcgacactcatacagccaagtatgacccttccctgaagcccctgtctgtttcctatgatcaagcaacttccctgaggatcctcaacaatgatcatgctttcaacgtggtgtttgatgactctcaggacaaagcagtgctcaagggaggacccctggatggcacttacagattgattcagtttcactttcactggggttcacttgatggacaaggttcagagcatactgtggataaaaagaaatatgctgcagaacttcacttggttcactggaacaccaaatatggggattttgggaaagctgtacagcaacctgatggactggccgttctaggtatttttttgaaggttggcagcgctaaaccgggccttcagaaagttgttgatgtgctggattccattaaaacaaagggcaagagtgctgacttcactaacttcgatcctcgtggcctccttcctgaatccctggattactggacctacccaggctcactgaccacccctcctcttctggaatgtgtgacctggattgtgctcaaggaacccatcagcgtcagcagcgagcaggtgttgaaattccgtaaacttaacttcattggggagggtgaacccgaagaactgatggtggacaactggcgcccagctcagccactgaagaacaggcaaatcaaagcttccttcaaatga

SEQ ID NO: 211121 - DNA, 2244 bp, Artificial Sequence
  Description of Artificial Sequence: Synthetic Construct
atggccttaccagtgaccgccttgctcctgccgctggccttgctgctccacgccgccaggccggacatccagatgacacagactacatcctccctgtctgcctctctgggagacagagtcaccatcagttgcagggcaagtcaggacattagtaaatatttaaattggtatcagcagaaaccagatggaactgttaaactcctgatctaccatacatcaagattacactcaggagtcccatcaaggttcagtggcagtgggtctggaacagattattctctcaccattagcaacctggagcaagaagatattgccacttacttttgccaacagggtaatacgcttccgtacacgttcggaggggggaccaagctggagatcacaggtggcggtggctcgggcggtggtgggtcgggtggcggcggatctgaggtgaaactgcaggagtcaggacctggcctggtggcgccctcacagagcctgtccgtcacatgcactgtctcaggggtctcattacccgactatggtgtaagctggattcgccagcctccacgaaagggtctggagtggctgggagtaatatggggtagtgaaaccacatactataattcagctctcaaatccagactgaccatcatcaaggacaactccaagagccaagttttcttaaaaatgaacagtctgcaaactgatgacacagccatttactactgtgccaaacattattactacggtggtagctatgctatggactactggggccaaggaacctcagtcaccgtctcctcaaccacgacgccagcgccgcgaccaccaacaccggcgcccaccatcgcgtcgcagcccctgtccctgcgcccagaggcgtgccggccagcggcggggggcgcagtgcacacgagggggctggacttcgcctgtgatatctacatctgggcgcccttggccgggacttgtggggtccttctcctgtcactggttatcaccctttactgcaaacggggcagaaagaaactcctgtatatattcaaacaaccatttatgagaccagtacaaactactcaagaggaagatggctgtagctgccgatttccagaagaagaagaaggaggatgtgaactgagagtgaagttcagcaggagcgcagacgcccccgcgtacaagcagggccagaaccagctctataacgagctcaatctaggacgaagagaggagtacgatgttttggacaagagacgtggccgggaccctgagatggggggaaagccgagaaggaagaaccctcaggaaggcctgtacaatgaactgcagaaagataagatggcggaggcctacagtgagattgggatgaaaggcgagcgccggaggggcaaggggcacgatggcctttaccagggtctcagtacagccaccaaggacacctacgacgcccttcacatgcaggccctgccccctcgcggatcctcccatcactgggggtacggcaaacacaacggacctgagcactggcataaggacttccccattgccaagggagagcgtcagtcccctgttgacatcgacactcatacagccaagtatgacccttccctgaagcccctgtctgtttcctatgatcaagcaacttccctgaggatcctcaacaatggtcatgctttcaacgtggagtttgatgactctcaggacaaagcagtgctcaagggaggacccctggatggcacttacagattgattcagtttcactttcactggggttcacttgatggacaaggttcagagcatactgtggataaaaagaaatatgctgcagaacttcacttggttcactggaacaccaaatatggggattttgggaaagctgtgcagcaacctgatggactggccgttctaggtatttttttgaaggttggcagcgctaaaccgggccttcagaaagttgttgatgtgctggattccattaaaacaaagggcaagagtgctgacttcactaacttcgatcctcgtggcctccttcctgaatccctggattactggacctacccaggctcaccgaccacccctcctcttctggaatgtgtgacctggattgtgctcaaggaacccatcagcgtcagcagcgagcaggtgttgaaattccgtaaacttaacttcaatggggagggtgaacccgaagaactgatggtggacaactggcgcccagctcagccactgaagaacaggcaaatcaaagcttccttcaaatga

SEQ ID NO: 211122 - DNA, 2244 bp, Artificial Sequence
  Description of Artificial Sequence: Synthetic Construct
atggccttaccagtgaccgccttgctcctgccgctggccttgctgctccacgccgccaggccggacatccagatgacacagactacatcctccctgtctgcctctctgggagacagagtcaccatcagttgcagggcaagtcaggacattagtaaatatttaaattggtatcagcagaaaccagatggaactgttaaactcctgatctaccatacatcaagattacactcaggagtcccatcaaggttcagtggcagtgggtctggaacagattattctctcaccattagcaacctggagcaagaagatattgccacttacttttgccaacagggtaatacgcttccgtacacgttcggaggggggaccaagctggagatcacaggtggcggtggctcgggcggtggtgggtcgggtggcggcggatctgaggtgaaactgcaggagtcaggacctggcctggtggcgccctcacagagcctgtccgtcacatgcactgtctcaggggtctcattacccgactatggtgtaagctggattcgccagcctccacgaaagggtctggagtggctgggagtaatatggggtagtgaaaccacatactataattcagctctcaaatccagactgaccatcatcaaggacaactccaagagccaagttttcttaaaaatgaacagtctgcaaactgatgacacagccatttactactgtgccaaacattattactacggtggtagctatgctatggactactggggccaaggaacctcagtcaccgtctcctcaaccacgacgccagcgccgcgaccaccaacaccggcgcccaccatcgcgtcgcagcccctgtccctgcgcccagaggcgtgccggccagcggcggggggcgcagtgcacacgagggggctggacttcgcctgtgatatctacatctgggcgcccttggccgggacttgtggggtccttctcctgtcactggttatcaccctttactgcaaacggggcagaaagaaactcctgtatatattcaaacaaccatttatgagaccagtacaaactactcaagaggaagatggctgtagctgccgatttccagaagaagaagaaggaggatgtgaactgagagtgaagttcagcaggagcgcagacgcccccgcgtacaagcagggccagaaccagctctataacgagctcaatctaggacgaagagaggagtacgatgttttggacaagagacgtggccgggaccctgagatggggggaaagccgagaaggaagaaccctcaggaaggcctgtacaatgaactgcagaaagataagatggcggaggcctacagtgagattgggatgaaaggcgagcgccggaggggcaaggggcacgatggcctttaccagggtctcagtacagccaccaaggacacctacgacgcccttcacatgcaggccctgccccctcgcggatcctcccatcactgggggtacggcaaacacaacggacctgagcactggcataaggacttccccattgccaagggagagcgccagtcccctgttgacatcgacactcatacagccaagtatgacccttccctgaagcccctgtctgtttcctatgatcaagcaacttccctgaggatcctcaacaatggtcatgctttcaacgtggagtttgatgactctcaggacaaagcagtgctcaagggaggacccctggatggcacttacagattgattcagtttcactttcactggggttcacttgatggacaaggttcagagcatactgtggataaaaagaaatatgctgcagaacttcacttggttcactggaacaccaaatatggggattttgggaaagctgtgcagcaacctgatggactggccgttctaggtatttttttgaaggttggcagcgctaaaccgggccatcagaaagttgttgatgtgctggattccattaaaacaaagggcaagtgtgctgacttcactaactacgatcctcgtggcctccttcctgattccctggattactggacctacccaggctcactgaccacccctcctcttctggaatgtgtgacctggattgtgctcaaggaacccatcagcgtcagcagcgagcaggtgttgaaattccgtaaacttaacttcaatggggagggtgaacccgaagaactgatggtggacaactggcgcccagctcagccactgaagaacaggcaaatcaaagcttccttcaaatga

SEQ ID NO: 211123 - DNA, 2244 bp, Artificial Sequence
  Description of Artificial Sequence: Synthetic Construct
atggccttaccagtgaccgccttgctcctgccgctggccttgctgctccacgccgccaggccggacatccagatgacacagactacatcctccctgtctgcctctctgggagacagagtcaccatcagttgcagggcaagtcaggacattagtaaatatttaaattggtatcagcagaaaccagatggaactgttaaactcctgatctaccatacatcaagattacactcaggagtcccatcaaggttcagtggcagtgggtctggaacagattattctctcaccattagcaacctggagcaagaagatattgccacttacttttgccaacagggtaatacgcttccgtacacgttcggaggggggaccaagctggagatcacaggtggcggtggctcgggcggtggtgggtcgggtggcggcggatctgaggtgaaactgcaggagtcaggacctggcctggtggcgccctcacagagcctgtccgtcacatgcactgtctcaggggtctcattacccgactatggtgtaagctggattcgccagcctccacgaaagggtctggagtggctgggagtaatatggggtagtgaaaccacatactataattcagctctcaaatccagactgaccatcatcaaggacaactccaagagccaagttttcttaaaaatgaacagtctgcaaactgatgacacagccatttactactgtgccaaacattattactacggtggtagctatgctatggactactggggccaaggaacctcagtcaccgtctcctcaaccacgacgccagcgccgcgaccaccaacaccggcgcccaccatcgcgtcgcagcccctgtccctgcgcccagaggcgtgccggccagcggcggggggcgcagtgcacacgagggggctggacttcgcctgtgatatctacatctgggcgcccttggccgggacttgtggggtccttctcctgtcactggttatcaccctttactgcaaacggggcagaaagaaactcctgtatatattcaaacaaccatttatgagaccagtacaaactactcaagaggaagatggctgtagctgccgatttccagaagaagaagaaggaggatgtgaactgagagtgaagttcagcaggagcgcagacgcccccgcgtacaagcagggccagaaccagctctataacgagctcaatctaggacgaagagaggagtacgatgttttggacaagagacgtggccgggaccctgagatggggggaaagccgagaaggaagaaccctcaggaaggcctgtacaatgaactgcagaaagataagatggcggaggcctacagtgagattgggatgaaaggcgagcgccggaggggcaaggggcacgatggcctttaccagggtctcagtacagccaccaaggacacctacgacgcccttcacatgcaggccctgccccctcgcggatcctcccatcactgggggtacggcaaacacaacggacctgagcactggcataaggacttccccattgccaagggagagctccagtcccctgttgacatcgacactcatacagccaagtatgacccttccctgaagcccctgtctgtttcctatgatcaagcaacttccctgaggatcctcaacaatggtcatgctttcaacgtggagtttgatgactctcaggacaaagcagtgctcaagggaggacccctggatggcatttacagattgattcagtttcactttcactggggttcacttgatggacaaggttcagagcatactgtggataaaaagaaatatgctgcagaacttcacttggtttactggaacaccaaatatggggattttgggaaagctgtgcagcaacctgatggactggccgttctaggtatttttttgaaggttggcagcgctaaaccgggccttcagaaagttgttgatgtgctggattccattaaaacaaagggcaagagtgctgacttcactaacttcgatcctcgtggcctccttcctgaatccctggattactggacctacccaggctcactgaccacccctcctcttctggaatgtgtgacctggattgtgctcaaggaacccatcagcgtcagcagcgagcaggtgttgaaattccgtaaacttaacttcaatggggagggtgaacccgaagaactgatggtggacaactggcgcccagctcagccactgaaggacaggcaaatcaaagcttccttcaaatga

SEQ ID NO: 211124 - DNA, 2244 bp, Artificial Sequence
  Description of Artificial Sequence: Synthetic Construct
atggccttaccagtgaccgccttgctcctgccgctggccttgctgctccacgccgccaggccggacatccagatgacacagactacatcctccctgtctgcctctctgggagacagagtcaccatcagttgcagggcaagtcaggacattagtaaatatttaaattggtatcagcagaaaccagatggaactgttaaactcctgatctaccatacatcaagattacactcaggagtcccatcaaggttcagtggcagtgggtctggaacagattattctctcaccattagcaacctggagcaagaagatattgccacttacttttgccaacagggtaatacgcttccgtacacgttcggaggggggaccaagctggagatcacaggtggcggtggctcgggcggtggtgggtcgggtggcggcggatctgaggtgaaactgcaggagtcaggacctggcctggtggcgccctcacagagcctgtccgtcacatgcactgtctcaggggtctcattacccgactatggtgtaagctggattcgccagcctccacgaaagggtctggagtggctgggagtaatatggggtagtgaaaccacatactataattcagctctcaaatccagactgaccatcatcaaggacaactccaagagccaagttttcttaaaaatgaacagtctgcaaactgatgacacagccatttactactgtgccaaacattattactacggtggtagctatgctatggactactggggccaaggaacctcagtcaccgtctcctcaaccacgacgccagcgccgcgaccaccaacaccggcgcccaccatcgcgtcgcagcccctgtccctgcgcccagaggcgtgccggccagcggcggggggcgcagtgcacacgagggggctggacttcgcctgtgatatctacatctgggcgcccttggccgggacttgtggggtccttctcctgtcactggttatcaccctttactgcaaacggggcagaaagaaactcctgtatatattcaaacaaccatttatgagaccagtacaaactactcaagaggaagatggctgtagctgccgatttccagaagaagaagaaggaggatgtgaactgagagtgaagttcagcaggagcgcagacgcccccgcgtacaagcagggccagaaccagctctataacgagctcaatctaggacgaagagaggagtacgatgttttggacaagagacgtggccgggaccctgagatggggggaaagccgagaaggaagaaccctcaggaaggcctgtacaatgaactgcagaaagataagatggcggaggcctacagtgagattgggatgaaaggcgagcgccggaggggcaaggggcacgatggcctttaccagggtctcagtacagccaccaaggacacctacgacgcccttcacatgcaggccctgccccctcgcggatcctcccatcactgggggtacggcaaacacaacggacctgagcactggcataaggacttccccattgccaagggagagcgccagtcccctgttgacatcgacactcatacagccaagtatgacccttccctgaagcccctgtctgtttcctatgatcaagcaactaatctgaggatcctcaacaatggtcatgctttcaacgtggagtttgatgactctcaggacaaagcagtgctcaagggaggacccctggatggcacttacagattgattcagtttcactttcactggggttcacttgatggacaaggttcagagcatactgtggataaaaagaaatatgctgcagaacttcacttggttcactggaacaccaaatatggggattttgggaaagctgtgcagcaacctgatggactggccgttctaggtatttttttgaaggttggcagcgctaaaccgggccttcagaaagttgttgatgtgctggattccattaaaacaaagggcaagagtgctgacttcactaacttcgatcctcgtggcctccttcctgaatccctggattactggacctacccaggctcactgaccacccctcctcttctggaatgtgtgacctggattgtgctcaaggaacccatcagcgtcagcagcgagcaggtgttgaaattccgtaaacttaacttcaatggggagggtgaacccgaagaactgatggtggacaactggcgcccagctcagccactgaagaacaggcaaatcaaagcttccttcaaatga

SEQ ID NO: 211125 - DNA, 2244 bp, Artificial Sequence
  Description of Artificial Sequence: Synthetic Construct
atggccttaccagtgaccgccttgctcctgccgctggccttgctgctccacgccgccaggccggacatccagatgacacagactacatcctccctgtctgcctctctgggagacagagtcaccatcagttgcagggcaagtcaggacattagtaaatatttaaattggtatcagcagaaaccagatggaactgttaaactcctgatctaccatacatcaagattacactcaggagtcccatcaaggttcagtggcagtgggtctggaacagattattctctcaccattagcaacctggagcaagaagatattgccacttacttttgccaacagggtaatacgcttccgtacacgttcggaggggggaccaagctggagatcacaggtggcggtggctcgggcggtggtgggtcgggtggcggcggatctgaggtgaaactgcaggagtcaggacctggcctggtggcgccctcacagagcctgtccgtcacatgcactgtctcaggggtctcattacccgactatggtgtaagctggattcgccagcctccacgaaagggtctggagtggctgggagtaatatggggtagtgaaaccacatactataattcagctctcaaatccagactgaccatcatcaaggacaactccaagagccaagttttcttaaaaatgaacagtctgcaaactgatgacacagccatttactactgtgccaaacattattactacggtggtagctatgctatggactactggggccaaggaacctcagtcaccgtctcctcaaccacgacgccagcgccgcgaccaccaacaccggcgcccaccatcgcgtcgcagcccctgtccctgcgcccagaggcgtgccggccagcggcggggggcgcagtgcacacgagggggctggacttcgcctgtgatatctacatctgggcgcccttggccgggacttgtggggtccttctcctgtcactggttatcaccctttactgcaaacggggcagaaagaaactcctgtatatattcaaacaaccatttatgagaccagtacaaactactcaagaggaagatggctgtagctgccgatttccagaagaagaagaaggaggatgtgaactgagagtgaagttcagcaggagcgcagacgcccccgcgtacaagcagggccagaaccagctctataacgagctcaatctaggacgaagagaggagtacgatgttttggacaagagacgtggccgggaccctgagatggggggaaagccgagaaggaagaaccctcaggaaggcctgtacaatgaactgcagaaagataagatggcggaggcctacagtgagattgggatgaaaggcgagcgccggaggggcaaggggcacgatggcctttaccagggtctcagtacagccaccaaggacacctacgacgcccttcacatgcaggccctgccccctcgcggatcctcccatcactgggggtacggcaaacacaacggacctgagcactggcataaggacttccccattgccaagggagagcgccagtcccctgttgacatcgacactcatacagccaagtatgacccttccctgaagcccctgtctgtttcctatgatcaagcaacttccctgaggatcctcaacaatggtcatgctttcaacgtggagtttgatttttctcaggacaaagcagtgctcaagggaggacccctggatggcacttacagattgattcagtttcactttcactggggttcacttgatggacaaggttcagagcatactgtggataaaaagaaatatgctgcagaacttcacttggttcactggaacaccaaatatggggattttgggaaagctgtgcagcaacctgatggactggccgttctaggtatttttttgaaggttggcagcgctaaaccgggccttcagaaagttgttgatgtgctggattccattaaaacaaagggcaagagtgctgacttcactaacttcgatcctcgtggcctccttcctgaatccctggattactggacctacccaggctcactgaccacccctcctcttctggaatgtgtgacctggattgtgctcaaggaacccatcagcgtcagcagcgagcaggtgttgaaattccgtaaacttaacttcaatggggagggtgaacccgaagaactgatgtttgacaactggcgcccagctcagttgctgaagaacaggcaaatcaaagcttccttcaaatga

SEQ ID NO: 211126 - DNA, 2244 bp, Artificial Sequence
  Description of Artificial Sequence: Synthetic Construct
atggccttaccagtgaccgccttgctcctgccgctggccttgctgctccacgccgccaggccggacatccagatgacacagactacatcctccctgtctgcctctctgggagacagagtcaccatcagttgcagggcaagtcaggacattagtaaatatttaaattggtatcagcagaaaccagatggaactgttaaactcctgatctaccatacatcaagattacactcaggagtcccatcaaggttcagtggcagtgggtctggaacagattattctctcaccattagcaacctggagcaagaagatattgccacttacttttgccaacagggtaatacgcttccgtacacgttcggaggggggaccaagctggagatcacaggtggcggtggctcgggcggtggtgggtcgggtggcggcggatctgaggtgaaactgcaggagtcaggacctggcctggtggcgccctcacagagcctgtccgtcacatgcactgtctcaggggtctcattacccgactatggtgtaagctggattcgccagcctccacgaaagggtctggagtggctgggagtaatatggggtagtgaaaccacatactataattcagctctcaaatccagactgaccatcatcaaggacaactccaagagccaagttttcttaaaaatgaacagtctgcaaactgatgacacagccatttactactgtgccaaacattattactacggtggtagctatgctatggactactggggccaaggaacctcagtcaccgtctcctcaaccacgacgccagcgccgcgaccaccaacaccggcgcccaccatcgcgtcgcagcccctgtccctgcgcccagaggcgtgccggccagcggcggggggcgcagtgcacacgagggggctggacttcgcctgtgatatctacatctgggcgcccttggccgggacttgtggggtccttctcctgtcactggttatcaccctttactgcaaacggggcagaaagaaactcctgtatatattcaaacaaccatttatgagaccagtacaaactactcaagaggaagatggctgtagctgccgatttccagaagaagaagaaggaggatgtgaactgagagtgaagttcagcaggagcgcagacgcccccgcgtacaagcagggccagaaccagctctataacgagctcaatctaggacgaagagaggagtacgatgttttggacaagagacgtggccgggaccctgagatggggggaaagccgagaaggaagaaccctcaggaaggcctgtacaatgaactgcagaaagataagatggcggaggcctacagtgagattgggatgaaaggcgagcgccggaggggcaaggggcacgatggcctttaccagggtctcagtacagccaccaaggacacctacgacgcccttcacatgcaggccctgccccctcgcggatcctcccatcactgggggtacggcaaacacaacggacctgagcactggcataaggacttccccattgccaagggagagcgccagtcccctgttgacatcgacactcatacagccaagtatgacccttccctgaagcccctgtctgtttcctatgatcaagcaacttccctgaggatcctcaacaatggtcatgctttcaacgtggagtttttggactctcaggacaaagcagtgctcaagggaggacccctggatggcaattacagattgattcagtttcactttcactggggttcacttgatggacaaggttcagagcatactgtggataaaaagaaatatgctgcagaacttcacttggttcactggaacaccaaatatggggattttgggaaagctgtgcagcaacctgatggactggccgttctaggtatttttttgaaggttggcagcgctaaaccgggccttcagaaagttgttgatgtgctggattccattaaaacaaagggcaagagtgctgacttcactaacttcgatcctcgtggcctccttcctgaatccctggattactggacctacccaggctcactgaccacccctcctcttctggaatgtgtgacctggattgtgctcaaggaacccatcagcgtcagcagcgagcaggtgttgaaattccgtaaacttaacttcaatggggagggtgaacccgaagaactgatggtggacaactggcgcccagctcagccacggaagaacaggcaaatcaaagcttccttcaaatga

SEQ ID NO: 211127 - DNA, 2244 bp, Artificial Sequence
  Description of Artificial Sequence: Synthetic Construct
atggccttaccagtgaccgccttgctcctgccgctggccttgctgctccacgccgccaggccggacatccagatgacacagactacatcctccctgtctgcctctctgggagacagagtcaccatcagttgcagggcaagtcaggacattagtaaatatttaaattggtatcagcagaaaccagatggaactgttaaactcctgatctaccatacatcaagattacactcaggagtcccatcaaggttcagtggcagtgggtctggaacagattattctctcaccattagcaacctggagcaagaagatattgccacttacttttgccaacagggtaatacgcttccgtacacgttcggaggggggaccaagctggagatcacaggtggcggtggctcgggcggtggtgggtcgggtggcggcggatctgaggtgaaactgcaggagtcaggacctggcctggtggcgccctcacagagcctgtccgtcacatgcactgtctcaggggtctcattacccgactatggtgtaagctggattcgccagcctccacgaaagggtctggagtggctgggagtaatatggggtagtgaaaccacatactataattcagctctcaaatccagactgaccatcatcaaggacaactccaagagccaagttttcttaaaaatgaacagtctgcaaactgatgacacagccatttactactgtgccaaacattattactacggtggtagctatgctatggactactggggccaaggaacctcagtcaccgtctcctcaaccacgacgccagcgccgcgaccaccaacaccggcgcccaccatcgcgtcgcagcccctgtccctgcgcccagaggcgtgccggccagcggcggggggcgcagtgcacacgagggggctggacttcgcctgtgatatctacatctgggcgcccttggccgggacttgtggggtccttctcctgtcactggttatcaccctttactgcaaacggggcagaaagaaactcctgtatatattcaaacaaccatttatgagaccagtacaaactactcaagaggaagatggctgtagctgccgatttccagaagaagaagaaggaggatgtgaactgagagtgaagttcagcaggagcgcagacgcccccgcgtacaagcagggccagaaccagctctataacgagctcaatctaggacgaagagaggagtacgatgttttggacaagagacgtggccgggaccctgagatggggggaaagccgagaaggaagaaccctcaggaaggcctgtacaatgaactgcagaaagataagatggcggaggcctacagtgagattgggatgaaaggcgagcgccggaggggcaaggggcacgatggcctttaccagggtctcagtacagccaccaaggacacctacgacgcccttcacatgcaggccctgccccctcgcggatcctcccatcactgggggtacggcaaacacaacggacctgagcactggcataaggacttccccattgccaagggagagcgccagtcccctgttgacatcgacactcatacagccaagtatgacccttccctgaagcccctgtctgtttcctatgatcaagcaacttccctgaggatcctcaacaatggtcatgctttcaacgtggagtttgatgactctcaggacaaagcagtgctcaagggaggacccctggatggcacttacagattgattcagtttcactttcactggggttcacttgatggacaaggttcagagcatactgtggataaaaagaaatatgctgcagaacttcacttggttcactggaacaccaaatatggggattttgggaaagctgtgcagcaacctgatggactggccgttctaggtatttttttgaaggttggcagcgctaaaccgggccttcagaaagttgttgatgtgctggattccattaaaacaaagggcaagagtgctgacttcactaacttcgatcctcgtggcagtcttcctgaatccctggattactggacctacccaggctcactgaccacccctcctcttctggaatgtgtgacctggattgtgctcaaggaacccatcagcgtcagcagcgagcaggtgttgaaattccgtaaacttaacttcaatggggagggtgaacccgaagaactgatggtggacaactggcgcccagctcagccactgaagaacaggcaaatcaaagcttccttcaaatga

SEQ ID NO: 211128 - protein, 238 aa, Artificial Sequence
  Description of Artificial Sequence: Synthetic polypeptide
VSKGEELFTGVVPILVELDGDVNGHKFSVSGEGEGDATYGKLTLKFICTTGKLPVPWPTLVTTLTYGVQCFSRYPDHMKQHDFFKSAMPEGYVQERTIFFKDDGNYKTRAEVKFEGDTLVNRIELKGIDFKEDGNILGHKLEYNYNSHNVYIMADKQKNGIKVNFKIRHNIEDGSVQLADHYQQNTPIGDGPVLLPDNHYLSTQSKLSKDPNEKRDHMVLLEFVTAAGITLGMDELYK

SEQ ID NO: 211129 - protein, 8 aa, Artificial Sequence
  Description of Artificial Sequence: Synthetic peptide
DYKDDDDK

SEQ ID NO: 211130 - protein, 5 aa, Artificial Sequence
  Description of Artificial Sequence: Synthetic Linker
GSGSG

SEQ ID NO: 211131 - protein, 9 aa, Artificial Sequence
  Description of Artificial Sequence: Synthetic peptide
YPYDVPDYA

SEQ ID NO: 211132 - protein, 5 aa, Artificial Sequence
  Description of Artificial Sequence: Synthetic Linker
GSLDG

SEQ ID NO: 211133 - DNA, 714 bp, Artificial Sequence
  Description of Artificial Sequence: Synthetic polynucleotide
gtgagcaagggcgaggagctgttcaccggggtggtgcccatcctggtcgagctggacggcgacgtaaacggccacaagttcagcgtgtccggcgagggcgagggcgatgccacctacggcaagctgaccctgaagttcatctgcaccaccggcaagctgcccgtgccctggcccaccctcgtgaccaccctgacctacggcgtgcagtgcttcagccgctaccccgaccacatgaagcagcacgacttcttcaagtccgccatgcccgaaggctacgtccaggagcgcaccatcttcttcaaggacgacggcaactacaagacccgcgccgaggtgaagttcgagggcgacaccctggtgaaccgcatcgagctgaagggcatcgacttcaaggaggacggcaacatcctggggcacaagctggagtacaactacaacagccacaacgtctatatcatggccgacaagcagaagaacggcatcaaggtgaacttcaagatccgccacaacatcgaggacggcagcgtgcagctcgccgaccactaccagcagaacacccccatcggcgacggccccgtgctgctgcccgacaaccactacctgagcacccagtccaagctgagcaaagaccccaacgagaagcgcgatcacatggtcctgctggagttcgtgaccgccgccgggatcactctcggcatggacgagctgtacaag

SEQ ID NO: 211134 - DNA, 24 bp, Artificial Sequence
  Description of Artificial Sequence: Synthetic oligonucleotide
gactacaaagacgatgacgacaag

SEQ ID NO: 211135 - DNA, 15 bp, Artificial Sequence
  Description of Artificial Sequence: Synthetic Linker
ggatccggttcaggg

SEQ ID NO: 211136 - DNA, 27 bp, Artificial Sequence
  Description of Artificial Sequence: Synthetic oligonucleotide
tacccatacgatgttccagattacgct

SEQ ID NO: 211137 - DNA, 15 bp, Artificial Sequence
  Description of Artificial Sequence: Synthetic Linker
ggtagtctagatgga

SEQ ID NO: 211138 - protein, 14 aa, Artificial Sequence
  Description of Artificial Sequence: Synthetic Construct
YDSLEIPPLSLPPP

SEQ ID NO: 211139 - protein, 43 aa, Artificial Sequence
  Description of Artificial Sequence: Synthetic Construct
RYWPKPLGIRPVCVCLYVIFHHIAVFWQCEGPETWPCLLDEHS

SEQ ID NO: 211140 - protein, 102 aa, Artificial Sequence
  Description of Artificial Sequence: Synthetic Construct
GSFPSRQRNARSVECREGSSSSGSFLKTNNVCSDPLQAAEPPTWRQVPLRPKATCIRYTCKGGTTPVPRCELDSCGKSQMALLKRIQQGAEGCPEGTPLYGI

SEQ ID NO: 211141 - protein, 246 aa, Artificial Sequence
  Description of Artificial Sequence: Synthetic Construct
SGASVHMLYMCLVEVKKTSRPPEPRGRGFPLKNTMISLPQPTRRRPSMTEYKPTVRLATRDDVPRAVRTLAAAFADYPATRHTVDPDRHIERVTELQELFLTRVGLDIGKVWVADDGAAVAVWTTPESVEAGAVFAEIGPRMAELSGSRLAAQQQMEGLLAPHRPKEPAWFLATVGVSPDHQGKGLGSAVVLPGVEAAERAGVPAFLETSAPRNLPFYERLGFTVTADVEVPEGPRTWCMTRKPGA
